United States Patent Application Publication US 2026/0201011 A1 - sequence listing, part 4

SEQ ID NO: 15601 - protein, 1400 aa, Homo sapiens
MMASFQRSNSHDKVRRIVAEEGRTARNLIAWSVPLESKDDDGKPKCQTGGKSKRTIQGTHKTTKQSTAVDCKITSSTTGDKHFDKSPTKTRHPRKIDLRARYWAFLFDNLRRAVDEIYVTCESDQSVVECKEVLMMLDNYVRDFKALIDWIQLQEKLEKTDAQSRPTSLAWEVKKMSPGRHVIPSPSTDRINVTSNARRSLNFGGSTGTVPAPRLAPTGVSWADKVKAHHTGSTASSEITPAQSCPPMTVQKASRKNERKDAEGWETVQRGRPIRSRSTAVMPKVSLATEATRSKDDSDKENVCLLPDESIQKGQFVGDGTSNTIESHPKDSLHSCDHPLAEKTQFTVSTLDDVKNSGSIRDNYVRTSEISAVHIDTECVSVMLQAGTPPLQVNEEKFPAEKARIENEMDPSDISNSMAEVLAKKEELADRLEKANEEAIASAIAEEEQLTREIEAEENNDINIETDNDSDFSASMGSGSVSFCGMSMDWNDVLADYEARESWRQNTSWGDIVEEEPARPPGHGIHMHEKLSSPSRKRTIAESKKKHEEKQMKAQQLREKLREEKTLKLQKLLEREKDVRKWKEELLDQRRRMMEEKLLHAEFKREVQLQAIVKKAQEEEAKVNEIAFINTLEAQNKRHDVLSKLKEYEQRLNELQEERQRRQEEKQARDEAVQERKRALEAERQARVEELLMKRKEQEARIEQQRQEKEKAREDAARERARDREERLAALTAAQQEAMEELQKKIQLKHDESIRRHMEQIEQRKEKAAELSSGRHANTDYAPKLTPYERKKQCSLCNVLISSEVYLFSHVKGRKHQQAVRENTSIQGRELSDEEVEHLSLKKYIIDIVVESTAPAEALKDGEERQKNKKKAKKIKARMNFRAKEYESLMETKNSGSDSPYKAKLQRLAKDLLKQVQVQDSGSWANNKVSALDRTLGEITRILEKENVADQIAFQAAGGLTALEHILQAVVPATNVNTVLRIPPKSLCNAINVYNLTCNNCSENCSDVLFSNKITFLMDLLIHQLTVYVPDENNTILGRNTNKQVFEGLTTGLLKVSAVVLGCLIANRPDGNCQPATPKIPTQEMKNKPSQGDPFNNRVQDLISYVVNMGLIDKLCACFLSVQGPVDENPKMAIFLQHAAGLLHAMCTLCFAVTGRSYSIFDNNRQDPTGLTAALQATDLAGVLHMLYCVLFHGTILDPSTASPKENYTQNTIQVAIQSLRFFNSFAALHLPAFQSIVGAEGLSLAFRHMASSLLGHCSQVSCESLLHEVIVCVGYFTVNHPDNQVIVQSGRHPTVLQKLCQLPFQYFSDPRLIKVLFPSLIAACYNNHQNKIILEQEMSCVLLATFIQDLAQTPGQAENQPYQPKGKCLGSQDYLELANRFPQQAWEEARQFFLKKEKK

SEQ ID NO: 15602 - protein, 348 aa, Homo sapiens
MPRSFLVKKVKLDAFSSADLESAYGRARSDLGAPLHDKGYLSDYVGPSSVYDGDAEAALLKGPSPEPMYAAAVRGELGPAAAGSAPPPTPRPELATAAGGYINGDAAVSEGYAADAFFITDGRSRRKASNAGSAAAPSTASAAAPDGDAGGGGGAGGRSLGSGPGGRGGTRAGAGTEARAGPGAAGAGGRHACGECGKTYATSSNLSRHKQTHRSLDSQLARRCPTCGKVYVSMPAMAMHLLTHDLRHKCGVCGKAFSRPWLLQGHMRSHTGEKPFGCAHCGKAFADRSNLRAHMQTHSAFKHFQCKRCKKSFALKSYLNKHYESACFKGGAGGPAAPAPPQLSPVQA

SEQ ID NO: 15603 - protein, 307 aa, Homo sapiens
MPRSFLVKKIKGDGFQCSGVPAPTYHPLETAYVLPGARGPPGDNGYAPHRLPPSSYDADQKPGLELAPAEPAYPPAAPEEYSDPESPQSSLSARYFRGEAAVTDSYSMDAFFISDGRSRRRRGGGGGDAGGSGDAGGAGGRAGRAGAQAGGGHRHACAECGKTYATSSNLSRHKQTHRSLDSQLARKCPTCGKAYVSMPALAMHLLTHNLRHKCGVCGKAFSRPWLLQGHMRSHTGEKPFGCAHCGKAFADRSNLRAHMQTHSAFKHYRCRQCDKSFALKSYLHKHCEAACAKAAEPPPPTPAGPAS

SEQ ID NO: 15604 - protein, 201 aa, Homo sapiens
MSFATLRPAPPGRYLYPEVSPLSEDEDRGSDSSGSDEKPCRVHAARCGLQGARRRAGGRRAGGGGPGGRPGREPRQRHTANARERDRTNSVNTAFTALRTLIPTEPADRKLSKIETLRLASSYISHLGNVLLAGEACGDGQPCHSGPAFFHAARAGSPPPPPPPPPARDGENTQPKQICTFCLSNQRKLSKDRDRKTAIRS

SEQ ID NO: 15605 - protein, 216 aa, Homo sapiens
MGGSGVGTAWHGPLARPSGTLPFASSMPSPVDASSADGGSGLGSHRRKRTTFSKGQLLELERAFAAWPYPNISTHEHLAWVTCLPEAKVQVWFQKRWAKIIKNRKSGILSPGSECPQSSCSLPDTLQQPWDPQMPGQPPPSSGTPQRTSVCRHSSCPAPGLSPRQGWEGAKAVAPWGSAGASEVHPSLERATPQTSLGSLSDLIYALAIVVNVDHS

SEQ ID NO: 15606 - protein, 1596 aa, Homo sapiens
MESRETLSSSRQRGGESDFLPVSSAKPPAAPGCAGEPLLSTPGPGKGIPVGGERMEPEEEDELGSGRDVDSNSNADSEKWVAGDGLEEQEFSIKEANFTEGSLKLKIQTTKRAKKPPKNLENYICPPEIKITIKQSGDQKVSRAGKNSKATKEEERSHSKKKLLTASDLAASDLKGFQPQAYERPQKHSTLHYDTGLPQDFTGDTLKPKHQQKSSSQNHMDWSTNSDSGPVTQNCFISPESGRETASTSKIPALEPVASFAKAQGKKGSAGNTWSQLSNNNKDLLLGGVAPSPSSHSSPAPPSSSAECNGLQPLVDQDGGGTKEPPEPPTVGSKKKSSKKDVISQTIPNPDLDWVKNAQKAFDNTEGKREGYSADSAQEASPARQNVSSASNPENDSSHVRITIPIKAPSLDPTNHKRKKRQSIKAVVEKIMPEKALASGITMSSEVVNRILSNSEGNKKDPRVPKLSKMIENESPSVGLETGGNAEKVIPGGVSKPRKPPMVMTPPTCTDHSPSRKLPEIQHPKFAAKRRWTCSKPKPSTMLREAVMATSDKLMLEPPSAYPITPSSPLYTNTDSLTVITPVKKKRGRPKKQPLLTVETIHEGTSTSPVSPISREFPGTKKRKRRRNLAKLAQLVPGEDKPMSEMKFHKKVGKLGVLDKKTIKTINKMKTLKRKNILNQILSCSSSVALKAKAPPETSPGAAAIESKLGKQINVSKRGTIYIGKKRGRKPRAELPPPSEEPKTAIKHPRPVSSQPDVPAVPSNFQSLVASSPAAMHPLSTQLGGSNGNLSPASTETNFSELKTMPNLQPISALPTKTQKGIHSGTWKLSPPRLMANSPSHLCEIGSLKEITLSPVSESHSEETIPSDSGIGTDNNSTSDQAEKSSESRRRYSFDFCSLDNPEAIPSDTSTKNRHGHRQKHLIVDNFLAHESLKKPKHKRKRKSLQNRDDLQFLADLEELITKFQVFRISHRSYTFYHENPYPSIFRINFDHYYPVPYIQYDPLLYLRRTSDLKSKKKRGRPAKTNDTMTKVPFLQGFSYPIPSGSYYAPYGMPYTSMPMMNLGYYGQYPAPLYLSHTLGAASPFMRPTVPPPQFHTNSHVKMSGAAKHKAKHGVHLQGPVSMGLGDMQPSLNPPKVGSASLSSGRLHKRKHKHKHKHKEDRILGTHDNLSGLFAGKATGFSSHILSERLSSADKELPLVSEKNKHKEKQKHQHSEAGHKASKNNFEVDTLSTLSLSDAQHWTQAKEKGDLSSEPVDSCTKRYSGSGGDGGSTRSENLDVFSEMNPSNDKWDSDVSGSKRRSYEGFGTYREKDIQAFKMNRKERSSYDSSMSPGMPSPHLKVDQTAVHSKNEGSVPTMMTRKKPAAVDSVTIPPAPVLSLLAASAATSDAVGSSLKKRFKRREIEAIQCEVRKMCNYTKILSTKKNLDHVNKILKAKRLQRQSKTGNNFVKKRRGRPRKQPTQFDEDSRDQMPVLEKCIDLPSKRGQKPSLSPLVLEPAASQDTIMATIEAVIHMAREAPPLPPPPPPPLPPPPPPPLPPPPPLPKTPRGGKRKHKPQAPAQPPQQSPPQQPLPQEEEVKAKRQRKSRGSESEVLP

SEQ ID NO: 15607 - protein, 707 aa, Homo sapiens
MSRDRFRSRGGGGGGFHRRGGGGGRGGLHDFRSPPPGMGLNQNRGPMGPGPGQSGPKPPIPPPPPHQQQQQPPPQQPPPQQPPPHQPPPHPQPHQQQQPPPPPQDSSKPVVAQGPGPAPGVGSAPPASSSAPPATPPTSGAPPGSGPGPTPTPPPAVTSAPPGAPPPTPPSSGVPTTPPQAGGPPPPPAAVPGPGPGPKQGPGPGGPKGGKMPGGPKPGGGPGLSTPGGHPKPPHRGGGEPRGGRQHHPPYHQQHHQGPPPGGPGGRSEEKISDSEGFKANLSLLRRPGEKTYTQRCRLFVGNLPADITEDEFKRLFAKYGEPGEVFINKGKGFGFIKLESRALAEIAKAELDDTPMRGRQLRVRFATHAAALSVRNLSPYVSNELLEEAFSQFGPIERAVVIVDDRGRSTGKGIVEFASKPAARKAFERCSEGVFLLTTTPRPVIVEPLEQLDDEDGLPEKLAQKNPMYQKERETPPRFAQHGTFEYEYSQRWKSLDEMEKQQREQVEKNMKDAKDKLESEMEDAYHEHQANLLRQDLMRRQEELRRMEELHNQEMQKRKEMQLRQEEERRRREEEMMIRQREMEEQMRRQREESYSRMGYMDPRERDMRMGGGGAMNMGDPYGSGGQKFPPLGGGGGIGYEANPGVPPATMSGSMMGSDMRTERFGQGGAGPVGGQGPRGMGPGTPAGYGRGREEYEGPNKKPRF

SEQ ID NO: 15608 - protein, 292 aa, Homo sapiens
MEELTAFVSKSFDQKSKDGNGGGGGGGGKKDSITYREVLESGLARSRELGTSDSSLQDITEGGGHCPVHLFKDHVDNDKEKLKEFGTARVAEGIYECKEKREDVKSEDEDGQTKLKQRRSRTNFTLEQLNELERLFDETHYPDAFMREELSQRLGLSEARVQVWFQNRRAKCRKQENQMHKGVILGTANHLDACRVAPYVNMGALRMPFQQVQAQLQLEGVAHAHPHLHPHLAAHAPYLMFPPPPFGLPIASLAESASAAAVVAAAAKSNSKNSSIADLRLKARKHAEALGL

SEQ ID NO: 15609 - protein, 331 aa, Homo sapiens
MEELTAFVSKSFDQKVKEKKEAITYREVLESGPLRGAKEPTGCTEAGRDDRSSPAVRAAGGGGGGGGGGGGGGGGGGVGGGGAGGGAGGGRSPVRELDMGAAERSREPGSPRLTEVSPELKDRKEDAKGMEDEGQTKIKQRRSRTNFTLEQLNELERLFDETHYPDAFMREELSQRLGLSEARVQVWFQNRRAKCRKQENQLHKGVLIGAASQFEACRVAPYVNVGALRMPFQQDSHCNVTPLSFQVQAQLQLDSAVAHAHHHLHPHLAAHAPYMMFPAPPFGLPLATLAADSASAASVVAAAAAAKTTSKNSSIADLRLKAKKHAAALGL

SEQ ID NO: 15610 - protein, 766 aa, Homo sapiens
MKEKSKNAARTRREKENSEFYELAKLLPLPSAITSQLDKASIIRLTTSYLKMRVVFPEGLGEAWGHSSRTSPLDNVGRELGSHLLQTLDGFIFVVAPDGKIMYISETASVHLGLSQVELTGNSIYEYIHPADHDEMTAVLTAHQPYHSHFVQEYEIERSFFLRMKCVLAKRNAGLTCGGYKVIHCSGYLKIRQYSLDMSPFDGCYQNVGLVAVGHSLPPSAVTEIKLHSNMFMFRASLDMKLIFLDSRVAELTGYEPQDLIEKTLYHHVHGCDTFHLRCAHHLLLVKGQVTTKYYRFLAKHGGWVWVQSYATIVHNSRSSRPHCIVSVNYVLTDTEYKGLQLSLDQISASKPAFSYTSSSTPTMTDNRKGAKSRLSSSKSKSRTSPYPQYSGFHTERSESDHDSQWGGSPLTDTASPQLLDPADRPGSQHDASCAYRQFSDRSSLCYGFALDHSRLVEERHFHTQACEGGRCEAGRYFLGTPQAGREPWWGSRAALPLTKASPESREAYENSMPHIASVHRIHGRGHWDEDSVVSSPDPGSASESGDRYRTEQYQSSPHEPSKIETLIRATQQMIKEEENRLQLRKAPSDQLASINGAGKKHSLCFANYQQPPPTGEVCHGSALANTSPCDHIQQREGKMLSPHENDYDNSPTALSRISSPNSDRISKSSLILAKDYLHSDISPHQTAGDHPTVSPNCFGSHRQYFDKHAYTLTGYALEHLYDSETIRNYSLGCNGSHFDVTSHLRMQPDPAQGHKGTSVIITNGS

SEQ ID NO: 15611 - protein, 667 aa, Homo sapiens
MKEKSKNAAKTRREKENGEFYELAKLLPLPSAITSQLDKASIIRLTTSYLKMRAVFPEGLGDAWGQPSRAGPLDGVAKELGSHLLQTLDGFVFVVASDGKIMYISETASVHLGLSQVELTGNSIYEYIHPSDHDEMTAVLTAHQPLHHHLLQEYEIERSFFLRMKCVLAKRNAGLTCSGYKVIHCSGYLKIRQYMLDMSLYDSCYQIVGLVAVGQSLPPSAITEIKLYSNMFMFRASLDLKLIFLDSRVTEVTGYEPQDLIEKTLYHHVHGCDVFHLRYAHHLLLVKGQVTTKYYRLLSKRGGWVWVQSYATVVHNSRSSRPHCIVSVNYVLTEIEYKELQLSLEQVSTAKSQDSWRTALSTSQETRKLVKPKNTKMKTKLRTNPYPPQQYSSFQMDKLECGQLGNWRASPPASAAAPPELQPHSESSDLLYTPSYSLPFSYHYGHFPLDSHVFSSKKPMLPAKFGQPQGSPCEVARFFLSTLPASGECQWHYANPLVPSSSSPAKNPPEPPANTARHSLVPSYEAPAAAVRRFGEDTAPPSFPSCGHYREEPALGPAKAARQAARDGARLALARAAPECCAPPTPEAPGAPAQLPFVLLNYHRVLARRGPLGGAAPAASGLACAPGGPEAATGALRLRHPSPAATSPPGAPLPHYLGASVIITNGR

SEQ ID NO: 15612 - protein, 284 aa, Homo sapiens
MSMLPSFGFTQEQVACVCEVLQQGGNLERLGRFLWSLPACDHLHKNESVLKAKAVVAFHRGNFRELYKILESHQFSPHNHPKLQQLWLKAHYVEAEKLRGRPLGAVGKYRVRRKFPLPRTIWDGEETSYCFKEKSRGVLREWYAHNPYPSPREKRELAEATGLTTTQVSNWFKNRRQRDRAAEAKERENTENNNSSSNKQNQLSPLEGGKPLMSSSEEEFSPPQSPDQNSVLLLQGNMGHARSSNYSLPGLTASQPSHGLQTHQHQLQDSLLGPLTSSLVDLGS

SEQ ID NO: 15613 - protein, 291 aa, Homo sapiens
MSMLPTFGFTQEQVACVCEVLQQGGNIERLGRFLWSLPACEHLHKNESVLKAKAVVAFHRGNFRELYKILESHQFSPHNHAKLQQLWLKAHYIEAEKLRGRPLGAVGKYRVRRKFPLPRSIWDGEETSYCFKEKSRSVLREWYAHNPYPSPREKRELAEATGLTTTQVSNWFKNRRQRDRAAEAKERENNENSNSNSHNPLNGSGKSVLGSSEDEKTPSGTPDHSSSSPALLLSPPPPGLPSLHSLGHPPGPSAVPVPVPGGGGADPLQHHHGLQDSILNPMSANLVDLGS

SEQ ID NO: 15614 - protein, 332 aa, Homo sapiens
MVFRSPLDLYSSHFLLPNFADSHHRSILLASSGGGNGAGGGGGAGGGSGGGNGAGGGGAGGAGGGGGGGSRAPPEELSMFQLPTLNFSPEQVASVCETLEETGDIERLGRFLWSLPVAPGACEAINKHESILRARAVVAFHTGNFRDLYHILENHKFTKESHGKLQAMWLEAHYQEAEKLRGRPLGPVDKYRVRKKFPLPRTIWDGEQKTHCFKERTRSLLREWYLQDPYPNPSKKRELAQATGLTPTQVGNWFKNRRQRDRAAAAKNRLQHQAIGPSGMRSLAEPGCPTHGSAESPSTAASPTTSVSSLTERADTGTSILSVTSSDSECDV

SEQ ID NO: 15615 - protein, 781 aa, Homo sapiens
MSSSSPTGQIASAADIKQENGMESASEGQEAHREVAGGAAVGLSPPAPAPFPLEPGDAATAAARVSGEEGAVAAAAAGAAADQVQLHSELLGRHHHAAAAAAQTPLAFSPDHVACVCEALQQGGNLDRLARFLWSLPQSDLLRGNESLLKARALVAFHQGIYPELYSILESHSFESANHPLLQQLWYKARYTEAERARGRPLGAVDKYRLRRKFPLPRTIWDGEETVYCFKEKSRNALKELYKQNRYPSPAEKRHLAKITGLSLTQVSNWFKNRRQRDRNPSETQSKSESDGNPSTEDESSKGHEDLSPHPLSSSSDGITNLSLSSHMEPVYMQQIGNAKISLSSSGVLLNGSLVPASTSPVFLNGNSFIQGPSGVILNGLNVGNTQAVALNPPKMSSNIVSNGISMTDILGSTSQDVKEFKVLQSSANSATTTSYSPSVPVSFPGLIPSTEVKREGIQTVASQDGGSVVTFTTPVQINQYGIVQIPNSGANSQFLNGSIGFSPLQLPPVSVAASQGNISVSSSTSDGSTFTSESTTVQQGKVFLSSLAPSAVVYTVPNTGQTIGSVKQEGLERSLVFSQLMPVNQNAQVNANLSSENISGSGLHPLASSLVNVSPTHNFSLSPSTLLNPTELNRDIADSQPMSAPVASKSTVTSVSNTNYATLQNCSLITGQDLLSVPMTQAALGEIVPTAEDQVGHPSPAVHQDFVQEHRLVLQSVANMKENFLSNSESKATSSLMMLDSKSKYVLDGMVDTVCEDLETDKKELAKLQTVQLDEDMQDL

SEQ ID NO: 15616 - protein, 739 aa, Homo sapiens
MATLPAEPSAGPAAGGEAVAAAAATEEEEEEARQLLQTLQAAEGEAAAAAGAGAGAAAAGAEGPGSPGVPGSPPEAASEPPTGLRFSPEQVACVCEALLQAGHAGRLSRFLGALPPAERLRGSDPVLRARALVAFQRGEYAELYRLLESRPFPAAHHAFLQDLYLRARYHEAERARGRALGAVDKYRLRKKFPLPKTIWDGEETVYCFKERSRAALKACYRGNRYPTPDEKRRLATLTGLSLTQVSNWFKNRRQRDRTGAGGGAPCKSESDGNPTTEDESSRSPEDLERGAAPVSAEAAAQGSIFLAGTGPPAPCPASSSILVNGSFLAASGSPAVLLNGGPVIINGLALGEASSLGPLLLTGGGGAPPPQPSPQGASETKTSLVLDPQTGEVRLEEAQSEAPETKGAQVAAPGPALGEEVLGPLAQVVPGPPTAATFPLPPGPVPAVAAPQVVPLSPPPGYPTGLSPTSPLLNLPQVVPTSQVVTLPQAVGPLQLLAAGPGSPVKVAAAAGPANVHLINSGVGVTALQLPSATAPGNFLLANPVSGSPIVTGVALQQGKIILTATFPTSMLVSQVLPPAPGLALPLKPETAISVPEGGLPVAPSPALPEAHALGTLSAQQPPPAAATTSSTSLPFSPDSPGLLPNFPAPPPEGLMLSPAAVPVWSAGLELSAGTEGLLEAEKGLGTQAPHTVLRLPDPDPEGLLLGATAGGEVDEGLEAEAKVLTQLQSVPVEEPLEL

SEQ ID NO: 15617 - protein, 246 aa, Homo sapiens
MFQLPILNFSPQQVAGVCETLEESGDVERLGRFLWSLPVAPAACEALNKNESVLRARAIVAFHGGNYRELYHILENHKFTKESHAKLQALWLEAHYQEAEKLRGRPLGPVDKYRVRKKFPLPRTIWDGEQKTHCFKERTRHLLREWYLQDPYPNPSKKRELAQATGLTPTQVGNWFKNRRQRDRAAAAKNRLQQQVLSQGSGRALRAEGDGTPEVLGVATSPAASLSSKAATSAISITSSDSECDI

SEQ ID NO: 15618 - protein, 728 aa, Homo sapiens
MEAAAGGRGCFQPHPGLQKTLEQFHLSSMSSLGGPAAFSARWAQEAYKKESAKEAGAAAVPAPVPAATEPPPVLHLPAIQPPPPVLPGPFFMPSDRSTERCETVLEGETISCFVVGGEKRLCLPQILNSVLRDFSLQQINAVCDELHIYCSRCTADQLEILKVMGILPFSAPSCGLITKTDAERLCNALLYGGAYPPPCKKELAASLALGLELSERSVRVYHECFGKCKGLLVPELYSSPSAACIQCLDCRLMYPPHKFVVHSHKALENRTCHWGFDSANWRAYILLSQDYTGKEEQARLGRCLDDVKEKFDYGNKYKRRVPRVSSEPPASIRPKTDDTSSQSPAPSEKDKPSSWLRTLAGSSNKSLGCVHPRQRLSAFRPWSPAVSASEKELSPHLPALIRDSFYSYKSFETAVAPNVALAPPAQQKVVSSPPCAAAVSRAPEPLATCTQPRKRKLTVDTPGAPETLAPVAAPEEDKDSEAEVEVESREEFTSSLSSLSSPSFTSSSSAKDLGSPGARALPSAVPDAAAPADAPSGLEAELEHLRQALEGGLDTKEAKEKFLHEVVKMRVKQEEKLSAALQAKRSLHQELEFLRVAKKEKLREATEAKRNLRKEIERLRAENEKKMKEANESRLRLKRELEQARQARVCDKGCEAGRLRAKYSAQIEDLQVKLQHAEADREQLRADLLREREAREHLEKVVKELQEQLWPRARPEAAGSEGAAELEP

SEQ ID NO: 15619 - protein, 684 aa, Homo sapiens
MENLQTNFSLVQGSTKKLNGMGDDGSPPAKKMITDIHANGKTINKVPTVKKEHLDDYGEAPVETDGEHVKRTCTSVPETLHLNPSLKHTLAQFHLSSQSSLGGPAAFSARHSQESMSPTVFLPLPSPQVLPGPLLIPSDSSTELTQTVLEGESISCFQVGGEKRLCLPQVLNSVLREFTLQQINTVCDELYIYCSRCTSDQLHILKVLGILPFNAPSCGLITLTDAQRLCNALLRPRTFPQNGSVLPAKSSLAQLKETGSAFEVEHECLGKCQGLFAPQFYVQPDAPCIQCLECCGMFAPQTFVMHSHRSPDKRTCHWGFESAKWHCYLHVNQKYLGTPEEKKLKIILEEMKEKFSMRSGKRNQSKTDAPSGMELQSWYPVIKQEGDHVSQTHSFLHPSYYLYMCDKVVAPNVSLTSAVSQSKELTKTEASKSISRQSEKAHSSGKLQKTVSYPDVSLEEQEKMDLKTSRELCSRLDASISNNSTSKRKSESATCNLVRDINKVGIGLVAAASSPLLVKDVICEDDKGKIMEEVMRTYLKQQEKLNLILQKKQQLQMEVKMLSSSKSMKELTEEQQNLQKELESLQNEHAQRMEEFYVEQKDLEKKLEQIMKQKCTCDSNLEKDKEAEYAGQLAELRQRLDHAEADRQELQDELRQEREARQKLEMMIKELKLQILKSSKTAKE

SEQ ID NO: 15620 - protein, 965 aa, Homo sapiens
MALLCGLGQVTLRIWVSLPSQSENGIGFLAARAFLRSGGMEALTTQLGPGREGSSSPNSKQELQPYSGSSALKPNQVGETSLYGVPIVSLVIDGQERLCLAQISNTLLKNYSYNEIHNRRVALGITCVQCTPVQLEILRRAGAMPISSRRCGMITKREAERLCKSFLGEHKPPKLPENFAFDVVHECAWGSRGSFIPARYNSSRAKCIKCGYCSMYFSPNKFIFHSHRTPDAKYTQPDAANFNSWRRHLKLSDKSATDELSHAWEDVKAMFNGGTRKRTFSLQGGGGGGANGGSGGQGKGGAGGGGGGGPGCGAEMAPGPPPHKSLRCGEDEAAGPPGPPPPHPQRGLGLATGASGPAGPGGPGGGAGVRSYPVIPVPSKGFGLLQKLPPPLFPHPYGFPTAFGLCPKKDDPVLGAGEPKGGPGTGSGGGGAGTGGGAGGPGASHLPPGAGAGPGGGAMFWGHQPSGAAKDAAAVAAAAAAATVYPTFPMFWPAAGSLPVPSYPAAQSQAKAVAAAVAAAAAAAAAAAGSGAPEPLDGAEPAKESGLGAEERCPSALSRGPLDEDGTDEALPPPLAPLPPPPPPPARKGSYVSAFRPVVKDTESIAKLYGSAREAYGAGPARGPGPGAGSGGYVSPDFLSEGSSSYNSASPDVDTADEPEVDVESNRFPDDEDAQEETEPSAPSAGGGPDGEQPTGPPSATSSGADGPANSPDGGSPRPRRRLGPPPAGRPAFGDLAAEDLVRRPERSPPSGGGGYELREPCGPLGGPAPAKVFAPERDEHVKSAAVALGPAASYVCTPEAHEPDKEDNHSPADDLETRKSYPDQRSISQPSPANTDRGEDGLTLDVTGTHLVEKDIENLAREELQKLLLEQMELRKKLEREFQSLKDNFQDQMKRELAYREEMVQQLQIVRDTLCNELDQERKARYAIQQKLKEAHDALHHFSCKMLTPRHCTGNCSFKPPLLP

SEQ ID NO: 15621 - protein, 1001 aa, Homo sapiens
MASSPLPGPNDILLASPSSAFQPDTLSQPRPGHANLKPNQVGQVILYGIPIVSLVIDGQERLCLAQISNTLLKNFSYNEIHNRRVALGITCVQCTPVQLEILRRAGAMPISSRRCGMITKREAERLCKSFLGENRPPKLPDNFAFDVSHECAWGCRGSFIPARYNSSRAKCIKCSYCNMYFSPNKFIFHSHRTPDAKYTQPDAANFNSWRRHLKLTDKSPQDELVFAWEDVKAMFNGGSRKRALPQPGAHPACHPLSSVKAAAVAAAAAVAGGGGLLGPHLLGAPPPPPPPPPPLAELAGAPHAHHKRPRFDDDDDSLQEAAVVAAASLSAAAASLSVAAASGGAGTGGGGAGGGCVAGVGVGAGAGAGAGAGAKGPRSYPVIPVPSKGSFGGVLQKFPGCGGLFPHPYTFPAAAAAFSLCHKKEDAGAAAEALGGAGAGGAGAAPKAGLSGLFWPAGRKDAFYPPFCMFWPPRTPGGLPVPTYLQPPPQPPSALGCALGESPALLRQAFLDLAEPGGAAGSAEAAPPPGQPPQVVANGPGSGPPPPAGGAGSRDALFESPPGGSGGDCSAGSTPPADSVAAAGAGAAAAGSGPAGSRVPAPHHPHLLEGRKAGGGSYHHSSAFRPVGGKDDAESLAKLHGASAGAPHSAQTHPHHHHHPHHHHHHHHPPQPPSPLLLLPPQPDEPGSERHHPAPPPPPPPPPPPPLAQHPHHRGLLSPGGTSCCYPSEDSSEDEDDEEEEQEVDVEGHKPPEGEEEEEGRDPDDDEEEDEETEVLLGDPLVGGGRFLQGRGPSEKGSSRDRAPAVAGAFPLGLNSSRLLQEDGKLGDPGSDLPPPPPPPLAPQKASGGGSSSPGSPVHHPSLEEQPSYKDSQKTKENNQVIVSTKDDNSFSDKNKEHSFFITDSDASGGDFWRERSGEHTQETNSPHSLKKDVENMGKEELQKVLFEQIDLRRRLEQEFQVLKGNTSFPVFNNFQDQMKRELAYREEMVQQLQIVSCIST

SEQ ID NO: 15622 - protein, 568 aa, Homo sapiens
MLPGLAAAAAHRCSWSSLCRLRLRCRAAACNPSDRQEWQNLVTFGSFSNMVPCSHPYIGTLSQVKLYSTNVQKEGQGSQTLRVEKVPSFETAEGIGTELKAPLKQEPLQVRVKAVLKKREYGSKYTQNNFITGVRAINEFCLKSSDLEQLRKIRRRSPHEDTESFTVYLRSDVEAKSLEVWGSPEALAREKKLRKEAEIEYRERLFRNQKILREYRDFLGNTKPRSRTASVFFKGPGKVVMVAICINGLNCFFKFLAWIYTGSASMFSEAIHSLSDTCNQGLLALGISKSVQTPDPSHPYGFSNMRYISSLISGVGIFMMGAGLSWYHGVMGLLHPQPIESLLWAYCILAGSLVSEGATLLVAVNELRRNARAKGMSFYKYVMESRDPSTNVILLEDTAAVLGVIIAATCMGLTSITGNPLYDSLGSLGVGTLLGMVSAFLIYTNTEALLGRSIQPEQVQRLTELLENDPSVRAIHDVKATDLGLGKVRFKAEVDFDGRVVTRSYLEKQDFDQMLQEIQEVKTPEELETFMLKHGENIIDTLGAEVDRLEKELKKRNPEVRHVDLEIL

SEQ ID NO: 15623 - protein, 465 aa, Homo sapiens
MNVTSLFSFTSPAVKRLLGWKQGDEEEKWAEKAVDALVKKLKKKKGAMEELEKALSCPGQPSNCVTIPRSLDGRLQVSHRKGLPHVIYCRVWRWPDLQSHHELKPLECCEFPFGSKQKEVCINPYHYKRVESPVLPPVLVPRHSEYNPQHSLLAQFRNLGQNEPHMPLNATFPDSFQQPNSHPFPHSPNSSYPNSPGSSSSTYPHSPTSSDPGSPFQMPADTPPPAYLPPEDPMTQDGSQPMDTNMMAPPLPSEINRGDVQAVAYEEPKHWCSIVYYELNNRVGEAFHASSTSVLVDGFTDPSNNKNRFCLGLLSNVNRNSTIENTRRHIGKGVHLYYVGGEVYAECLSDSSIFVQSRNCNYHHGFHPTTVCKIPSGCSLKIFNNQEFAQLLAQSVNHGFETVYELTKMCTIRMSFVKGWGAEYHRQDVTSTPCWIEIHLHGPLQWLDKVLTQMGSPHNPISSVS

SEQ ID NO: 15624 - protein, 467 aa, Homo sapiens
MSSILPFTPPVVKRLLGWKKSAGGSGGAGGGEQNGQEEKWCEKAVKSLVKKLKKTGRLDELEKAITTQNCNTKCVTIPSTCSEIWGLSTPNTIDQWDTTGLYSFSEQTRSLDGRLQVSHRKGLPHVIYCRLWRWPDLHSHHELKAIENCEYAFNLKKDEVCVNPYHYQRVETPVLPPVLVPRHTEILTELPPLDDYTHSIPENTNFPAGIEPQSNYIPETPPPGYISEDGETSDQQLNQSMDTGSPAELSPTTLSPVNHSLDLQPVTYSEPAFWCSIAYYELNQRVGETFHASQPSLTVDGFTDPSNSERFCLGLLSNVNRNATVEMTRRHIGRGVRLYYIGGEVFAECLSDSAIFVQSPNCNQRYGWHPATVCKIPPGCNLKIFNNQEFAALLAQSVNQGFEAVYQLTRMCTIRMSFVKGWGAEYRRQTVTSTPCWIELHLNGPLQWLDKVLTQMGSPSVRCSSMS

SEQ ID NO: 15625 - protein, 425 aa, Homo sapiens
MSSILPFTPPIVKRLLGWKKGEQNGQEEKWCEKAVKSLVKKLKKTGQLDELEKAITTQNVNTKCITIPRSLDGRLQVSHRKGLPHVIYCRLWRWPDLHSHHELRAMELCEFAFNMKKDEVCVNPYHYQRVETPVLPPVLVPRHTEIPAEFPPLDDYSHSIPENTNFPAGIEPQSNIPETPPPGYLSEDGETSDHQMNHSMDAGSPNLSPNPMSPAHNNLDLQPVTYCEPAFWCSISYYELNQRVGETFHASQPSMTVDGFTDPSNSERFCLGLLSNVNRNAAVELTRRHIGRGVRLYYIGGEVFAECLSDSAIFVQSPNCNQRYGWHPATVCKIPPGCNLKIFNNQEFAALLAQSVNQGFEAVYQLTRMCTIRMSFVKGWGAEYRRQTVTSTPCWIELHLNGPLQWLDKVLTQMGSPSIRCSSVS

SEQ ID NO: 15626 - protein, 552 aa, Homo sapiens
MDNMSITNTPTSNDACLSIVHSLMCHRQGGESETFAKRAIESLVKKLKEKKDELDSLITAITTNGAHPSKCVTIQRTLDGRLQVAGRKGFPHVIYARLWRWPDLHKNELKHVKYCQYAFDLKCDSVCVNPYHYERVVSPGIDLSGLTLQSNAPSSMMVKDEYVHDFEGQPSLSTEGHSIQTIQHPPSNRASTETYSTPALLAPSESNATSTANFPNIPVASTSQPASILGGSHSEGLLQIASGPQPGQQQNGFTGQPATYHHNSTTTWTGSRTAPYTPNLPHHQNGHLQHHPPMPPHPGHYWPVHNELAFQPPISNHPAPEYWCSIAYFEMDVQVGETFKVPSSCPIVTVDGYVDPSGGDRFCLGQLSNVHRTEAIERARLHIGKGVQLECKGEGDVWVRCLSDHAVFVQSYYLDREAGRAPGDAVHKIYPSAYIKVFDLRQCHRQMQQQAATAQAAAAAQAAAVAGNIPGPGSVGGIAPAISLSAAAGIGVDDLRRLCILRMSFVKGWGPDYPRQSIKETPCWIEIHLHRALQLLDEVLHTMPIADPQPLD

SEQ ID NO: 15627 - protein, 465 aa, Homo sapiens
MTSMASLFSFTSPAVKRLLGWKQGDEEEKWAEKAVDALVKKLKKKKGAMEELEKALSSPGQPSKCVTIPRSLDGRLQVSHRKGLPHVIYCRVWRWPDLQSHHELKPLDICEFPFGSKQKEVCINPYHYKRVESPVLPPVLVPRHNEFNPQHSLLVQFRNLSHNEPHMPQNATFPDSFHQPNNTPFPLSPNSPYPPSPASSTYPNSPASSGPGSPFQLPADTPPPAYMPPDDQMGQDNSQPMDTSNNMIPQIMPSISSRDVQPVAYEEPKHWCSIVYYELNNRVGEAFHASSTSVLVDGFTDPSNNKSRFCLGLLSNVNRNSTIENTRRHIGKGVHLYYVGGEVYAECLSDSSIFVQSRNCNFHHGFHPTTVCKIPSSCSLKIFNNQEFAQLLAQSVNHGFEAVYELTKMCTIRMSFVKGWGAEYHRQDVTSTPCWIEIHLHGPLQWLDKVLTQMGSPLNPISSVS

SEQ ID NO: 15628 - protein, 496 aa, Homo sapiens
MFRSKRSGLVRRLWRSRVVPDREEGGSGGGGGGDEDGSLGSRAEPAPRAREGGGCGRSEVRPVAPRRPRDAVGQRGAQGAGRRRRAGGPPRPMSEPGAGAGSSLLDVAEPGGPGWLPESDCETVTCCLFSERDAAGAPRDASDPLAGAALEPAGGGRSREARSRLLLLEQELKTVTYSLLKRLKERSLDTLLEAVESRGGVPGGCVLVPRADLRLGGQPAPPQLLLGRLFRWPDLQHAVELKPLCGCHSFAAAADGPTVCCNPYHFSRLCGPESPPPPYSRLSPRDEYKPLDLSDSTLSYTETEATNSLITAPGEFSDASMSPDATKPSHWCSVAYWEHRTRVGRLYAVYDQAVSIFYDLPQGSGFCLGQLNLEQRSESVRRTRSKIGFGILLSKEPDGVWAYNRGEHPIFVNSPTLDAPGGRALVVRKVPPGYSIKVFDFERSGLQHAPEPDAADGPYDPNSVRISFAKGWGPCYSRQFITSCPCWLEILLNNPR

SEQ ID NO: 15629 - protein, 426 aa, Homo sapiens
MFRTKRSALVRRLWRSRAPGGEDEEEGAGGGGGGGELRGEGATDSRAHGAGGGGPGRAGCCLGKAVRGAKGHHHPHPPAAGAGAAGGAEADLKALTHSVLKKLKERQLELLLQAVESRGGTRTACLLLPGRLDCRLGPGAPAGAQPAQPPSSYSLPLLLCKVFRWPDLRHSSEVKRLCCCESYGKINPELVCCNPHHLSRLCELESPPPPYSRYPMDFLKPTADCPDAVPSSAETGGTNYLAPGGLSDSQLLLEPGDRSHWCVVAYWEEKTRVGRLYCVQEPSLDIFYDLPQGNGFCLGQLNSDNKSQLVQKVRSKIGCGIQLTREVDGVWVYNRSSYPIFIKSATLDNPDSRTLLVHKVFPGFSIKAFDYEKAYSLQRPNDHEFMQQPWTGFTVQISFVKGWGQCYTRQFISSCPCWLEVIFNSR

SEQ ID NO: 15630 - protein, 467 aa, Homo sapiens
MHSTTPISSLFSFTSPAVKRLLGWKQGDEEEKWAEKAVDSLVKKLKKKKGAMDELERALSCPGQPSKCVTIPRSLDGRLQVSHRKGLPHVIYCRVWRWPDLQSHHELKPLECCEFPFGSKQKEVCINPYHYRRVETPVLPPVLVPRHSEYNPQLSLLAKFRSASLHSEPLMPHNATYPDSFQQPPCSALPPSPSHAFSQSPCTASYPHSPGSPSEPESPYQHSVDTPPLPYHATEASETQSGQPVDATADRHVVLSIPNGDFRPVCYEEPQHWCSVAYYELNNRVGETFQASSRSVLIDGFTDPSNNRNRFCLGLLSNVNRNSTIENTRRHIGKGVHLYYVGGEVYAECVSDSSIFVQSRNCNYQHGFHPATVCKIPSGCSLKVFNNQLFAQLLAQSVHHGFEVVYELTKMCTIRMSFVKGWGAEYHRQDVTSTPCWIEIHLHGPLQWLDKVLTQMGSPHNPISSVS

SEQ ID NO: 15631 - protein, 1054 aa, Homo sapiens
MEQDTAAVAATVAAADATATIVVIEDEQPGPSTSQEEGAAAAATEATAATEKGEKKKEKNVSSFQLKLAAKAPKSEKEMDPEYEEKMKADRAKRFEFLLKQTELFAHFIQPSAQKSPTSPLNMKLGRPRIKKDEKQSLISAGDYRHRRTEQEEDEELLSESRKTSNVCIRFEVSPSYVKGGPLRDYQIRGLNWLISLYENGVNGILADEMGLGKTLQTIALLGYLKHYRNIPGPHMVLVPKSTLHNWMNEFKRWVPSLRVICFVGDKDARAAFIRDEMMPGEWDVCVTSYEMVIKEKSVFKKFHWRYLVIDEAHRIKNEKSKLSEIVREFKSTNRLLLTGTPLQNNLHELWALLNFLLPDVFNSADDFDSWFDTKNCLGDQKLVERLHAVLKPFLLRRIKTDVEKSLPPKKEIKIYLGLSKMQREWYTKILMKDIDVLNSSGKMDKMRLLNILMQLRKCCNHPYLFDGAEPGPPYTTDEHIVSNSGKMVVLDKLLAKLKEQGSRVLIFSQMTRLLDILEDYCMWRGYEYCRLDGQTPHEEREDKFLEVEFLGQREAIEAFNAPNSSKFIFMLSTRAGGLGINLASADVVILYDSDWNPQVDLQAMDRAHRIGQKKPVRVFRLITDNTVEERIVERAEIKLRLDSIVIQQGRLIDQQSNKLAKEEMLQMIRHGATHVFASKESELTDEDITTILERGEKKTAEMNERLQKMGESSLRNFRMDIEQSLYKFEGEDYREKQKLGMVEWIEPPKRERKANYAVDAYFREALRVSEPKIPKAPRPPKQPNVQDFQFFPPRLFELLEKEILYYRKTIGYKVPRNPDIPNPALAQREEQKKIDGAEPLTPEETEEKEKLLTQGFTNWTKRDFNQFIKANEKYGRDDIDNIAREVEGKSPEEVMEYSAVFWERCNELQDIEKIMAQIERGEARIQRRISIKKALDAKIARYKAPFHQLRIQYGTSKGKNYTEEEDRFLICMLHKMGFDRENVYEELRQCVRNAPQFRFDWFIKSRTAMEFQRRCNTLISLIEKENMEIEERERAEKKKRATKTPMVKFSAFS

SEQ ID NO: 15632 - protein, 1590 aa, Homo sapiens; identical to SEQ ID NO: 12546

SEQ ID NO: 15633 - protein, 1647 aa, Homo sapiens
MSTPDPPLGGTPRPGPSPGPGPSPGAMLGPSPGPSPGSAHSMMGPSPGPPSAGHPIPTQGPGGYPQDNMHQMHKPMESMHEKGMSDDPRYNQMKGMGMRSGGHAGMGPPPSPMDQHSQGYPSPLGGSEHASSPVPASGPSSGPQMSSGPGGAPLDGADPQALGQQNRGPTPFNQNQLHQLRAQIMAYKMLARGQPLPDHLQMAVQGKRPMPGMQQQMPTLPPPSVSATGPGPGPGPGPGPGPGPAPPNYSRPHGMGGPNMPPPGPSGVPPGMPGQPPGGPPKPWPEGPMANAAAPTSTPQKLIPPQPTGRPSPAPPAVPPAASPVMPPQTQSPGQPAQPAPMVPLHQKQSRITPIQKPRGLDPVEILQEREYRLQARIAHRIQELENLPGSLAGDLRTKATIELKALRLLNFQRQLRQEVVVCMRRDTALETALNAKAYKRSKRQSLREARITEKLEKQQKIEQERKRRQKHQEYLNSILQHAKDFKEYHRSVTGKIQKLTKAVATYHANTEREQKKENERIEKERMRRLMAEDEEGYRKLIDQKKDKRLAYLLQQTDEYVANLTELVRQHKAAQVAKEKKKKKKKKKAENAEGQTPAIGPDGEPLDETSQMSDLPVKVIHVESGKILTGTDAPKAGQLEAWLEMNPGYEVAPRSDSEESGSEEEEEEEEEEQPQAAQPPTLPVEEKKKIPDPDSDDVSEVDARHIIENAKQDVDDEYGVSQALARGLQSYYAVAHAVTERVDKQSALMVNGVLKQYQIKGLEWLVSLYNNNLNGILADEMGLGKTIQTIALITYLMEHKRINGPFLIIVPLSTLSNWAYEFDKWAPSVVKVSYKGSPAARRAFVPQLRSGKFNVLLTTYEYIIKDKHILAKIRWKYMIVDEGHRMKNHHCKLTQVLNTHYVAPRRLLLTGTPLQNKLPELWALLNFLLPTIFKSCSTFEQWFNAPFAMTGEKVDLNEEETILIIRRLHKVLRPFLLRRLKKEVEAQLPEKVEYVIKCDMSALQRVLYRHMQAKGVLLTDGSEKDKKGKGGTKTLMNTIMQLRKICNHPYMFQHIEESFSEHLGFTGGIVQGLDLYRASGKFELLDRILPKLRATNHKVLLFCQMTSLMTIMEDYFAYRGFKYLRLDGTTKAEDRGMLLKTFNEPGSEYFIFLLSTRAGGLGLNLQSADTVIIFDSDWNPHQDLQAQDRAHRIGQQNEVRVLRLCTVNSVEEKILAAAKYKLNVDQKVIQAGMFDQKSSSHERRAFLQAILEHEEQDESRHCSTGSGSASFAHTAPPPAGVNPDLEEPPLKEEDEVPDDETVNQMIARHEEEFDLFMRMDLDRRREEARNPKRKPRLMEEDELPSWIIKDDAEVERLTCEEEEEKMFGRGSRHRKEVDYSDSLTEKQWLKAIEEGTLEEIEEEVRQKKSSRKRKRDSDAGSSTPTTSTRSRDKDDESKKQKKRGRPPAEKLSPNPPNLTKKMKKIVDAVIKYKDSSSGRQLSEVFIQLPSRKELPEYYELIRKPVDFKKIKERIRNHKYRSLNDLEKDVMLLCQNAQTFNLEGSLIYEDSIVLQSVFTSVRQKIEKEDDSEGEESEEEEEGEEEGSESESRSVKVKIKLGRKEKAQDRLKGGRRRPSRGSRAKPVVSDDDSEEEQEEDRSGSGSEED

SEQ ID NO: 15634 - protein, 1052 aa, Homo sapiens
MSSAAEPPPPPPPESAPSKPAASIASGGSNSSNKGGPEGVAAQAVASAASAGPADAEMEEIFDDASPGKQKEIQEPDPTYEEKMQTDRANRFEYLLKQTELFAHFIQPAAQKTPTSPLKMKPGRPRIKKDEKQNLLSVGDYRHRRTEQEEDEELLTESSKATNVCTRFEDSPSYVKWGKLRDYQVRGLNWLISLYENGINGILADEMGLGKTLQTISLLGYMKHYRNIPGPHMVLVPKSTLHNWMSEFKRWVPTLRSVCLIGDKEQRAAFVRDVLLPGEWDVCVTSYEMLIKEKSVFKKFNWRYLVIDEAHRIKNEKSKLSEIVREFKTTNRLLLTGTPLQNNLHELWSLLNFLLPDVFNSADDFDSWFDTNNCLGDQKLVERLHMVLRPFLLRRIKADVEKSLPPKKEVKIYVGLSKMQREWYTRILMKDIDILNSAGKMDKMRLLNILMQLRKCCNHPYLFDGAEPGPPYTTDMHLVTNSGKMVVLDKLLPKLKEQGSRVLIFSQMTRVLDILEDYCMWRNYEYCRLDGQTPHDERQDSINAYNEPNSTKFVFMLSTRAGGLGINLATADVVILYDSDWNPQVDLQAMDRAHRIGQTKTVRVFRFITDNTVEERIVERAEMKLRLDSIVIQQGRLVDQNLNKIGKDEMLQMIRHGATHVFASKESEITDEDIDGILERGAKKTAEMNEKLSKMGESSLRNFTMDTESSVYNFEGEDYREKQKIAFTEWIEPPKRERKANYAVDAYFREALRVSEPKAPKAPRPPKQPNVQDFQFFPPRLFELLEKEILFYRKTIGYKVPRNPELPNAAQAQKEEQLKIDEAESLNDEELEEKEKLLTQGFTNWNKRDFNQFIKANEKWGRDDIENIAREVEGKTPEEVIEYSAVFWERCNELQDIEKIMAQIERGEARIQRRISIKKALDTKIGRYKAPFHQLRISYGTNKGKNYTEEEDRFLICMLHKLGFDKENVYDELRQCIRNSPQFRFDWFLKSRTAMELQRRCNTLITLIERENMELEEKEKAEKKKRGPKPSTQKRKMDGAPDGRGRKKKLKL

SEQ ID NO: 15635 - protein, 1026 aa, Homo sapiens
MNLFNLDRFRFEKRNKIEEAPEATPQPSQPGPSSPISLSAEEENAEGEVSRANTPDSDITEKTEDSSVPETPDNERKASISYFKNQRGIQYIDLSSDSEDVVSPNCSNTVQEKTFNKDTVIIVSEPSEDEESQGLPTMARRNDDISELEDLSELEDLKDAKLQTLKELFPQRSDNDLLKLIESTSTMDGAIAAALLMFGDAGGGPRKRKLSSSSEPYEEDEFNDDQSIKKTRLDHGEESNESAESSSNWEKQESIVLKLQKEFPNFDKQELREVLKEHEWMYTEALESLKVFAEDQDMQYVSQSEVPNGKEVSSRSQNYPKNATKTKLKQKFSMKAQNGFNKKRKKNVFNPKRVVEDSEYDSGSDVGSSLDEDYSSGEEVMEDGYKGKILHFLQDASIGELTLIPQCSQKKAQKITELRPFNSWEALFTKMSKTNGLSEDLIWHCKTLIQERDVVIRLMNKCEDISNKLTKQVTMLTGNGGGWNIEQPSILNQSLSLKPYQKVGLNWLALVHKHGLNGILADEMGLGKTIQAIAFLAYLYQEGNNGPHLIVVPASTIDNWLREVNLWCPTLKVLCYYGSQEERKQIRFNIHSRYEDYNVIVTTYNCAISSSDDRSLFRRLKLNYAIFDEGHMLKNMGSIRYQHLMTINANNRLLLTGTPVQNNLLELMSLLNFVMPHMFSSSTSEIRRMFSSKTKSADEQSIYEKERIAHAKQIIKPFILRRVKEEVLKQLPPKKDRIELCAMSEKQEQLYLGLFNRLKKSINNLEKNTEMCNVMMQLRKMANHPLLHRQYYTAEKLKEMSQLMLKEPTHCEANPDLIFEDMEVMTDFELHVLCKQYRHINNFQLDMDLILDSGKFRVLGCILSELKQKGDRVVLFSQFTMMLDILEVLLKHHQHRYLRLDGKTQISERIHLIDEFNTDMDIFVFLLSTKAGGLGINLTSANVVILHDIDCNPYNDKQAEDRCHRVGQTKEVLVIKLISQGTIEESMLKINQQKLKLEQDMTTVDEGDEGSMPADIATLLKTSMGL

SEQ ID NO: 15636 - protein, 954 aa, Homo sapiens
MSLPLTEEQRKKIEENRQKALARRAEKLLAEQHQRTSSGTSIAGNPFQAKQGPSQNFPRESCKPVSHGVIFKQQNLSSSSNADQRPHDSHSFQAKGIWKKPEEMPTACPGHSPRSQMALTGISPPLAQSPPEVPKQQLLSYELGQGHAQASPEIRFTPFANPTHKPLAKPKSSQETPAHSSGQPPRDAKLEAKTAKASPSGQNISYIHSSSESVTPRTEGRLQQKSGSSVQKGVNSQKGKCVRNGDRFQVLIGYNAELIAVFKTLPSKNYDPDTKTWNFSMNDYSALMKAAQSLPTVNLQPLEWAYGSSESPSTSSEGQAGLPSAPSLSFVKGRCMLISRAYFEADISYSQDLIALFKQMDSRRYDVKTRKWSFLLEEHSKLIAKVRCLPQVQLDPLPTTLTLAFASQLKKTSLSLTPDVPEADLSEVDPKLVSNLMPFQRAGVNFAIAKGGRLLLADDMGLGKTIQAICIAAFYRKEWPLLVVVPSSVRFTWEQAFLRWLPSLSPDCINVVVTGKDRLTAGLINIVSFDLLSKLEKQLKTPFKVVIIDESHFLKNSRTARCRAAMPVLKVAKRVILLSGTPAMSRPAELYTQIIAVKPTFFPQFHAFGLRYCDAKRMPWGWDYSGSSNLGELKLLLEEAVMLRRLKSDVLSQLPAKQRKIVVIAPGRINARTRAALDAAAKEMTTKDKTKQQQKDALILFFNRTAEAKIPSVIEYILDLLESGREKFLVFAHHKVVLDAITQELERKHVQHIRIDGSTSSAEREDLCQQFQLSERHAVAVLSITAANMGLTFSSADLVVFAELFWNPGVLIQAEDRVHRIGQTSSVGIHYLVAKGTADDYLWPLIQEKIKVLAEAGLSETNFSEMTESTDYLYKDPKQQKIYDLFQKSFEKEGSDMELLEAAESFDPGSASGTSGSSSQNMGDTLDESSLTASPQKKRRFEFFDNWDSFTSPL

SEQ ID NO: 15637 - protein, 385 aa, Homo sapiens
MMMMALSKTFGQKPVKFQLEDDGEFYMIGSEVGNYLRMFRGSLYKRYPSLWRRLATVEERKKIVASSHGKKTKPNTKDHGYTTLATSVTLLKASEVEEILDGNDEKYKAVSISTEPPTYLREQKAKRNSQWVPTLPNSSHHLDAVPCSTTINRNRMGRDKKRTFPLCFDDHDPAVIHENASQPEVLVPIRLDMEIDGQKLRDAFTWNMNEKLMTPEMFSEILCDDLDLNPLTFVPAIASAIRQQIESYPTDSILEDQSDQRVIIKLNIHVGNISLVDQFEWDMSEKENSPEKFALKLCSELGLGGEFVTTIAYSIRGQLSWHQKTYAFSENPLPTVEIAIRNTGDADQWCPLLETLTDAEMEKKIRDQDRNTRRMRRLANTAPAW

SEQ ID NO: 15638 - protein, 1105 aa, Homo sapiens
MAAAAGGGGPGTAVGATGSGIAAAAAGLAVYRRKDGGPATKFWESPETVSQLDSVRVWLGKHYKKYVHADAPTNKTLAGLVVQLLQFQEDAFGKHVTNPAFTKLPAKCFMDFKAGGALCHILGAAYKYKNEQGWRRFDLQNPSRMDRNVEMFMNIEKTLVQNNCLTRPNIYLIPDIDLKLANKLKDIIKRHQGTFTDEKSKASHHIYPYSSSQDDEEWLRPVMRKEKQVLVHWGFYPDSYDTWVHSNDVDAEIEDPPIPEKPWKVHVKWILDTDIFNEWMNEEDYEVDENRKPVSFRQRISTKNEEPVRSPERRDRKASANARKRKHSPSPPPPTPTESRKKSGKKGQASLYGKRRSQKEEDEQEDLTKDMEDPTPVPNIEEVVLPKNVNLKKDSENTPVKGGTVADLDEQDEETVTAGGKEDEDPAKGDQSRSVDLGEDNVTEQTNHIIIPSYASWFDYNCIHVIERRALPEFFNGKNKSKTPEIYLAYRNFMIDTYRLNPQEYLTSTACRRNLTGDVCAVMRVHAFLEQWGLVNYQVDPESRPMAMGPPPTPHFNVLADTPSGLVPLHLRSPQVPAAQQMLNFPEKNKEKPVDLQNFGLRTDIYSKKTLAKSKGASAGREWTEQETLLLLEALEMYKDDWNKVSEHVGSRTQDECILHFLRLPIEDPYLENSDASLGPLAYQPVPFSQSGNPVMSTVAFLASVVDPRVASAAAKAALEEFSRVREEVPLELVEAHVKKVQEAARASGKVDPTYGLESSCIAGTGPDEPEKLEGAEEEKMEADPDGQQPEKAENKVENETDEGDKAQDGENEKNSEKEQDSEVSEDTKSEEKETEENKELTDTCKERESDTGKKKVEHEISEGNVATAAAAALASAATKAKHLAAVEERKIKSLVALLVETQMKKLEIKLRHFEELETIMDREKEALEQQRQQLLTERQNFHMEQLKYAELRARQQMEQQQHGQNPQQAHQHSGGPGLAPLGAAGHPGMMPHQQPPPYPLMHHQMPPPHPPQPGQIPGPGSMMPGQHMPGRMIPTVAANIHPSGSGPTPPGMPPMPGNILGPRVPLTAPNGMYPPPPQQQPPPPPPADGVPPPPAPGPPASAAP

SEQ ID NO: 15639 - protein, 1214 aa, Homo sapiens
MAVRKKDGGPNVKYYEAADTVTQFDNVRLWLGKNYKKYIQAEPPTNKSLSSLVVQLLQFQEEVFGKHVSNAPLTKLPIKCFLDFKAGGSLCHILAAAYKFKSDQGWRRYDFQNPSRMDRNVEMFMTIEKSLVQNNCLSRPNIFLCPEIEPKLLGKLKDIIKRHQGTVTEDKNNASHVVYPVPGNLEEEEWVRPVMKRDKQVLLHWGYYPDSYDTWIPASEIEASVEDAPTPEKPRKVHAKWILDTDTFNEWMNEEDYEVNDDKNPVSRRKKISAKTLTDEVNSPDSDRRDKKGGNYKKRKRSPSPSPTPEAKKKNAKKGPSTPYTKSKRGHREEEQEDLTKDMDEPSPVPNVEEVTLPKTVNTKKDSESAPVKGGTMTDLDEQEDESMETTGKDEDENSTGNKGEQTKNPDLHEDNVTEQTHHIIIPSYAAWFDYNSVHAIERRALPEFFNGKNKSKTPEIYLAYRNFMIDTYRLNPQEYLTSTACRRNLAGDVCAIMRVHAFLEQWGLINYQVDAESRPTPMGPPPTSHFHVLADTPSGLVPLQPKTPQQTSASQQMLNFPDKGKEKPTDMQNFGLRTDMYTKKNVPSKSKAAASATREWTEQETLLLLEALEMYKDDWNKVSEHVGSRTQDECILHFLRLPIEDPYLEDSEASLGPLAYQPIPFSQSGNPVMSTVAFLASVVDPRVASAAAKSALEEFSKMKEEVPTALVEAHVRKVEEAAKVTGKADPAFGLESSGIAGTTSDEPERIEESGNDEARVEGQATDEKKEPKEPREGGGAIEEEAKEKTSEAPKKDEEKGKEGDSEKESEKSDGDPIVDPEKEKEPKEGQEEVLKEVVESEGERKTKVERDIGEGNLSTAAAAALAAAAVKAKHLAAVEERKIKSLVALLVETQMKKLEIKLRHFEELETIMDREREALEYQRQQLLADRQAFHMEQLKYAEMRARQQHFQQMHQQQQQPPPALPPGSQPIPPTGAAGPPAVHGLAVAPASVVPAPAGSGAPPGSLGPSEQIGQAGSTAGPQQQQPAGAPQPGAVPPGVPPPGPHGPSPFPNQQTPPSMMPGAVPGSGHPGVAGNAPLGLPFGMPPPPPPPAPSIIPFGSLADSISINLPAPPNLHGHHHHLPFAPGTLPPPNLPVSMANPLHPNLPATTTMPSSLPLGPGLGSAAAQSPAIVAAVQGNLLPSASPLPDPGTPLPPDPTAPSPGTVTPVPPPQ

SEQ ID NO: 15640 - protein, 515 aa, Homo sapiens
MAARAGFQSVAPSGGAGASGGAGAAAALGPGGTPGPPVRMGPAPGQGLYRSPMPGAAYPRPGMLPGSRMTPQGPSMGPPGYGGNPSVRPGLAQSGMDQSRKRPAPQQIQQVQQQAVQNRNHNAKKKKMADKILPQRIRELVPESQAYMDLLAFERKLDQTIMRKRLDIQEALKRPIKQKRKLRIFISNTFNPAKSDAEDGEGTVASWELRVEGRLLEDSALSKYDATKQKRKFSSFFKSLVIELDKDLYGPDNHLVEWHRTATTQETDGFQVKRPGDVNVRCTVLLMLDYQPPQFKLDPRLARLLGIHTQTRPVIIQALWQYIKTHKLQDPHEREFVICDKYLQQIFESQRMKFSEIPQRLHALLMPPEPIIINHVISVDPNDQKKTACYDIDVEVDDTLKTQMNSFLLSTASQQEIATLDNKIHETIETINQLKTQREFMLSFARDPQGFINDWLQSQCRDLKTMTDVVGNPEEERRAEFYFQPWAQEAVCRYFYSKVQQRRQELEQALGIRNT

SEQ ID NO: 15641 - protein, 531 aa, Homo sapiens
MSGRGAGGFPLPPLSPGGGAVAAALGAPPPPAGPGMLPGPALRGPGPAGGVGGPGAAAFRPMGPAGPAAQYQRPGMSPGNRMPMAGLQVGPPAGSPFGAAAPLRPGMPPTMMDPFRKRLLVPQAQPPMPAQRRGLKRRKMADKVLPQRIRELVPESQAYMDLLAFERKLDQTIARKRMEIQEAIKKPLTQKRKLRIYISNTFSPSKAEGDSAGTAGTPGGTPAGDKVASWELRVEGKLLDDPSKQKRKFSSFFKSLVIELDKELYGPDNHLVEWHRMPTTQETDGFQVKRPGDLNVKCTLLLMLDHQPPQYKLDPRLARLLGVHTQTRAAIMQALWLYIKHNQLQDGHEREYINCNRYFRQIFSCGRLRFSEIPMKLAGLLQHPDPIVINHVISVDPNDQKKTACYDIDVEVDDPLKAQMSNFLASTTNQQEIASLDVKIHETIESINQLKTQRDFMLSFSTDPQDFIQEWLRSQRRDLKIITDVIGNPEEERRAAFYHQPWAQEAVGRHIFAKVQQRRQELEQVLGIRLT

SEQ ID NO: 15642 - protein, 483 aa, Homo sapiens
MAADEVAGGARKATKSKLFEFLVHGVRPGMPSGARMPHQGAPMGPPGSPYMGSPAVRPGLAPAGMEPARKRAAPPPGQSQAQSQGQPVPTAPARSRSAKRRKMADKILPQRIRELVPESQAYMDLLAFERKLDQTIMRKRVDIQEALKRPMKQKRKLRLYISNTFNPAKPDAEDSDGSIASWELRVEGKLLDDPSKQKRKFSSFFKSLVIELDKDLYGPDNHLVEWHRTPTTQETDGFQVKRPGDLSVRCTLLLMLDYQPPQFKLDPRLARLLGLHTQSRSAIVQALWQYVKTNRLQDSHDKEYINGDKYFQQIFDCPRLKFSEIPQRLTALLLPPDPIVINHVISVDPSDQKKTACYDIDVEVEEPLKGQMSSFLLSTANQQEISALDSKIHETIESINQLKIQRDFMLSFSRDPKGYVQDLLRSQSRDLKVMTDVAGNPEEERRAEFYHQPWSQEAVSRYFYCKIQQRRQELEQSLVVRNT

SEQ ID NO: 15643 - protein, 411 aa, Homo sapiens
MSKRPSYAPPPTPAPATQMPSTPGFVGYNPYSHLAYNNYRLGGNPGTNSRVTASSGITIPKPPKPPDKPLMPYMRYSRKVWDQVKASNPDLKLWEIGKIIGGMWRDLTDEEKQEYLNEYEAEKIEYNESMKAYHNSPAYLAYINAKSRAEAALEEESRQRQSRMEKGEPYMSIQPAEDPDDYDDGFSMKHTATARFQRNHRLISEILSESVVPDVRSVVTTARMQVLKRQVQSLMVHQRKLEAELLQIEERHQEKKRKFLESTDSFNNELKRLCGLKVEVDMEKIAAEIAQAEEQARKRQEEREKEAAEQAERSQSSIVPEEEQAANKGEEKKDDENIPMETEETHLEETTESQQNGEEGTSTPEDKESGQEGVDSMAEEGTSDSNTGSESNSATVEEPPTDPIPEDEKKE

SEQ ID NO: 15644 - protein, 264 aa, Homo sapiens
MPRSFLVRKPSDPNRKPNYSELQDSNPEFTFQQPYDQAHLLAAIPPPEILNPTASLPMLIWDSVLAPQAQPIAWASLRLQESPRVAELTSLSDEDSGKGSQPPSPPSPAPSSFSSTSVSSLEAEAYAAFPGLGQVPKQLAQLSEAKDLQARKAFNCKYCNKEYLSLGALKMHIRSHTLPCVCGTCGKAFSRPWLLQGHVRTHTGEKPFSCPHCSRAFADRSNLRAHLQTHSDVKKYQCQACARTFSRMSLLHKHQESGCSGCPR

SEQ ID NO: 15645 - protein, 268 aa, Homo sapiens
MPRSFLVKKHFNASKKPNYSELDTHTVIISPYLYESYSMPVIPQPEILSSGAYSPITVWTTAAPFHAQLPNGLSPLSGYSSSLGRVSPPPPSDTSSKDHSGSESPISDEEERLQSKLSDPHAIEAEKFQCNLCNKTYSTFSGLAKHKQLHCDAQSRKSFSCKYCDKEYVSLGALKMHIRTHTLPCVCKICGKAFSRPWLLQGHIRTHTGEKPFSCPHCNRAFADRSNLRAHLQTHSDVKKYQCKNCSKTFSRMSLLHKHEESGCCVAH

SEQ ID NO: 15646 - protein, 292 aa, Homo sapiens
MPRSFLVKTHSSHRVPNYRRLETQREINGACSACGGLVVPLLPRDKEAPSVPGDLPQPWDRSSAVACISLPLLPRIEEALGASGLDALEVSEVDPRASRAAIVPLKDSLNHLNLPPLLVLPTRWSPTLGPDRHGAPEKLLGAERMPRAPGGFECFHCHKPYHTLAGLARHRQLHCHLQVGRVFTCKYCDKEYTSLGALKMHIRTHTLPCTCKICGKAFSRPWLLQGHVRTHTGEKPYACSHCSRAFADRSNLRAHLQTHSDAKKYRCRRCTKTFSRMSLLARHEESGCCPGP

SEQ ID NO: 15647 - protein, 1469 aa, Homo sapiens
MDVDAEREKITQEIKELERILDPGSSGSHVEISESSLESDSEADSLPSEDLDPADPPISEEERWGEASNDEDDPKDKTLPEDPETCLQLNMVYQEVIQEKLAEANLLLAQNREQQEELMRDLAGSKGTKVKDGKSLPPSTYMGHFMKPYFKDKVTGVGPPANEDTREKAAQGIKAFEELLVTKWKNWEKALLRKSVVSDRLQRLLQPKLLKLEYLHQKQSKVSSELERQALEKQGREAEKEIQDINQLPEEALLGNRLDSHDWEKISNINFEGSRSAEEIRKFWQNSEHPSINKQEWSREEEERLQAIAAAHGHLEWQKIAEELGTSRSAFQCLQKFQQHNKALKRKEWTEEEDRMLTQLVQEMRVGSHIPYRRIVYYMEGRDSMQLIYRWTKSLDPGLKKGYWAPEEDAKLLQAVAKYGEQDWFKIREEVPGRSDAQCRDRYLRRLHFSLKKGRWNLKEEEQLIELIEKYGVGHWAKIASELPHRSGSQCLSKWKIMMGKKQGLRRRRRRARHSVRWSSTSSSGSSSGSSGGSSSSSSSSSEEDEPEQAQAGEGDRALLSPQYMVPDMDLWVPARQSTSQPWRGGAGAWLGGPAASLSPPKGSSASQGGSKEASTTAAAPGEETSPVQVPARAHGPVPRSAQASHSADTRPAGAEKQALEGGRRLLTVPVETVLRVLRANTAARSCTQKEQLRQPPLPTSSPGVSSGDSVARSHVQWLRHRATQSGQRRWRHALHRRLLNRRLLLAVTPWVGDVVVPCTQASQRPAVVQTQADGLREQLQQARLASTPVFTLFTQLFHIDTAGCLEVVRERKALPPRLPQAGARDPPVHLLQASSSAQSTPGHLFPNVPAQEASKSASHKGSRRLASSRVERTLPQASLLASTGPRPKPKTVSELLQEKRLQEARAREATRGPVVLPSQLLVSSSVILQPPLPHTPHGRPAPGPTVLNVPLSGPGAPAAAKPGTSGSWQEAGTSAKDKRLSTMQALPLAPVFSEAEGTAPAASQAPALGPGQISVSCPESGLGQSQAPAASRKQGLPEAPPFLPAAPSPTPLPVQPLSLTHIGGPHVATSVPLPVTWVLTAQGLLPVPVPAVVSLPRPAGTPGPAGLLATLLPPLTETRAAQGPRAPALSSSWQPPANMNREPEPSCRTDTPAPPTHALSQSPAEADGSVAFVPGEAQVAREIPEPRTSSHADPPEAEPPWSGRLPAFGGVIPATEPRGTPGSPSGTQEPRGPLGLEKLPLRQPGPEKGALDLEKPPLPQPGPEKGALDLGLLSQEGEAATQQWLGGQRGVRVPLLGSRLPYQPPALCSLRALSGLLLHKKALEHKATSLVVGGEAERPAGALQASLGLVRGQLQDNPAYLLLRARFLAAFTLPALLATLAPQGVRTTLSVPSRVGSESEDEDLLSELELADRDGQPGCTTATCPIQGAPDSGKCSASSCLDTSNDPDDLDVLRTRHARHTRKRRRLV

SEQ ID NO: 15648 - protein, 328 aa, Homo sapiens
MASRCSEPYPEVSRIPTVRGCNGSLSGALSCCEDSARGSGPPKAPTVAEGPSSCLRRNVISERERRKRMSLSCERLRALLPQFDGRREDMASVLEMSVQFLRLASALGPSQEQHAILASSKEMWHSLQEDVLQLTLSSQIQAGVPDPGTGASSGTRTPDVKAFLESPWSLDPASASPEPVPHILASSRQWDPASCTSLGTDKCEALLGLCQVRGGLPPFSEPSSLVPWPPGRSLPKAVRPPLSWPPFSQQQTLPVMSGEALGWLGQAGPLAMGAAPLGEPAKEDPMLAQEAGSALGSDVDDGTSFLLTAGPSSWPGEWGPGFRAGPPA

SEQ ID NO: 15649 - protein, 425 aa, Homo sapiens
MASSIICQEHCQISGQAKIDILLVGDVTVGYLADTVQKLFANIAEVTITISDTKEAAALLDDCIFNMVLLKVPSSLSAEELEAIKLIRFGKKKNTHSLFVFIIPENFKGCISGHGMDIALTEPLTMEKMSNVVKYWTTCPSNTVKTENATGPEELGLPLQRSYSEHLGYFPTDLFACSESLRNGNGLELNASLSEFEKNKKISLLHSSKEKLRRERIKYCCEQLRTLLPYVKGRKNDAASVLEATVDYVKYIREKISPAVMAQITEALQSNMRFCKKQQTPIELSLPGTVMAQRENSVMSTYSPERGLQFLTNTCWNGCSTPDAESSLDEAVRVPSSSASENAIGDPYKTHISSAALSLNSLHTVRYYSKVTPSYDATAVTNQNISIHLPSAMPPVSKLLPRHCTSGLGQTCTTHPNCLQQFWAY

SEQ ID NO: 15650 - protein, 391 aa, Homo sapiens
MYSMMMETDLHSPGGAQAPTNLSGPAGAGGGGGGGGGGGGGGGAKANQDRVKRPMNAFMVWSRGQRRKMAQENPKMHNSEISKRLGAEWKVMSEAEKRPFIDEAKRLRALHMKEHPDYKYRPRRKTKTLLKKDKYSLAGGLLAAGAGGGGAAVAMGVGVGVGAAAVGQRLESPGGAAGGGYAHVNGWANGAYPGSVAAAAAAAAMMQEAQLAYGQHPGAGGAHPHAHPAHPHPHHPHAHPHNPQPMHRYDMGALQYSPISNSQGYMSASPSGYGGLPYGAAAAAAAAAGGAHQNSAVAAAAAAAAASSGALGALGSLVKSEPSGSPPAPAHSRAPCPGDLREMISMYLPAGEGGDPAAAAAAAAQSRLHSLPQHYQGAGAGVNGTVPLTHI

SEQ ID NO: 15651 - protein, 466 aa, Homo sapiens
MAEEQDLSEVELSPVGSEEPRCLSPGSAPSLGPDGGGGGSGLRASPGPGELGKVKKEQQDGEADDDKFPVCIREAVSQVLSGYDWTLVPMPVRVNGASKSKPHVKRPMNAFMVWAQAARRKLADQYPHLHNAELSKTLGKLWRLLNESDKRPFIEEAERLRMQHKKDHPDYKYQPRRRKNGKAAQGEAECPGGEAEQGGTAAIQAHYKSAHLDHRHPGEGSPMSDGNPEHPSGQSHGPPTPPTTPKTELQSGKADPKRDGRSMGEGGKPHIDFGNVDIGEISHEVMSNMETFDVAELDQYLPPNGHPGHVSSYSAAGYGLGSALAVASGHSAWISKPPGVALPTVSPPGVDAKAQVKTETAGPQGPPHYTDQPSTSQIAYTSLSLPHYGSAFPSISRPQFDYSDHQPSGPYYGHSGQASGLYSAFSYMGPSQRPLYTAISDPSPSGPQSHSPTHWEQPVYTTLSRP

SEQ ID NO: 15652 - protein, 441 aa, Homo sapiens
MVQQAESLEAESNLPREALDTEEGEFMACSPVALDESDPDWCKTASGHIKRPMNAFMVWSKIERRKIMEQSPDMHNAEISKRLGKRWKMLKDSEKIPFIREAERLRLKHMADYPDYKYRPRKKPKMDPSAKPSASQSPEKSAAGGGGGSAGGGAGGAKTSKGSSKKCGKLKAPAAAGAKAGAGKAAQSGDYGGAGDDYVLGSLRVSGSGGGGAGKTVKCVFLDEDDDDDDDDDELQLQIKQEPDEEDEEPPHQQLLQPPGQQPSQLLRRYNVAKVPASPTLSSSAESPEGASLYDEVRAGATSGAGGGSRLYYSFKNITKQHPPPLAQPALSPASSRSVSTSSSSSSGSSSGSSGEDADDLMFDLSLNFSQSAHSASEQQLGGGAAAGNLSLSLVDKDLDSFSEGSLGSHFEFPDYCTPELSEMIAGDWLEANFSDLVFTY

SEQ ID NO: 15653 - protein, 315 aa, Homo sapiens
MVQQRGARAKRDGGPPPPGPGPAEEGAREPGWCKTPSGHIKRPMNAFMVWSQHERRKIMDQWPDMHNAEISKRLGRRWQLLQDSEKIPFVREAERLRLKHMADYPDYKYRPRKKSKGAPAKARPRPPGGSGGGSRLKPGPQLPGRGGRRAAGGPLGGGAAAPEDDDEDDDEELLEVRLVETPGRELWRMVPAGRAARGQAERAQGPSGEGAAAAAAASPTPSEDEEPEEEEEEAAAAEEGEEETVASGEESLGFLSRLPPGPAGLDCSALDRDPDLQPPSGTSHFEFPDYCTPEVTEMIAGDWRPSSIADLVFTY

SEQ ID NO: 15654 - protein, 622 aa, Homo sapiens
MSMRSPISAQLALDGVGTMVNCTIKSEEKKEPCHEAPQGSATAAEPQPGDPARASQDSADPQAPAQGNFRGSWDCSSPEGNGSPEPKRPGVSEAASGSQEKLDFNRNLKEVVPAIEKLLSSDWKERFLGRNSMEAKDVKGTQESLAEKELQLLVMIHQLSTLRDQLLTAHSEQKNMAAMLFEKQQQQMELARQQQEQIAKQQQQLIQQQHKINLLQQQIQQVNMPYVMIPAFPPSHQPLPVTPDSQLALPIQPIPCKPVEYPLQLLHSPPAPVVKRPGAMATHHPLQEPSQPLNLTAKPKAPELPNTSSSPSLKMSSCVPRPPSHGGPTRDLQSSPPSLPLGFLGEGDAVTKAIQDARQLLHSHSGALDGSPNTPFRKDLISLDSSPAKERLEDGCVHPLEEAMLSCDMDGSRHFPESRNSSHIKRPMNAFMVWAKDERRKILQAFPDMHNSSISKILGSRWKSMTNQEKQPYYEEQARLSRQHLEKYPDYKYKPRPKRTCIVEGKRLRVGEYKALMRTRRQDARQSYVIPPQAGQVQMSSSDVLYPRAAGMPLAQPLVEHYVPRSLDPNMPVIVNTCSLREEGEGTDDRHSVADGEMYRYSEDEDSEGEEKSDGELVVLTD

SEQ ID NO: 15655 - protein, 240 aa, Homo sapiens
MSKPSDHIKRPMNAFMVWSRGQRRKMAQENPKMHNSEISKRLGAEWKLLSEAEKRPYIDEAKRLRAQHMKEHPDYKYRPRRKPKNLLKKDRYVFPLPYLGDTDPLKAAGLPVGASDGLLSAPEKARAFLPPASAPYSLLDPAQFSSSAIQKMGEVPHTLATGALPYASTLGYQNGAFGSLSCPSQHTHTHPSPTNPGYVVPCNCTAWSASTLQPPVAYILFPGMTKTGIDPYSSAHATAM

SEQ ID NO: 15656 - protein, 233 aa, Homo sapiens [sequence omitted]

SEQ ID NO: 15657 - protein, 414 aa, Homo sapiens [sequence omitted]

SEQ ID NO: 15658 - protein, 384 aa, Homo sapiens [sequence omitted]

SEQ ID NO: 15659 - protein, 317 aa, Homo sapiens
MYNMMETELKPPGPQQTSGGGGGNSTAAAAGGNQKNSPDRVKRPMNAFMVWSRGQRRKMAQENPKMHNSEISKRLGAEWKLLSETEKRPFIDEAKRLRALHMKEHPDYKYRPRRKTKTLMKKDKYTLPGGLLAPGGNSMASGVGVGAGLGAGVNQRMDSYAHMNGWSNGSYSMMQDQLGYPQHPGLNAHGAAQMQPMHRYDVSALQYNSMTSSQTYMNGSPTYSMSYSQQGTPGMALGSMGSVVKSEASSSPPVVTSSSHSRAPCQAGDLRDMISMYLPGAEVPEPAAPSRLHMSQHYQSGPVPGTAINGTLPLSHM

SEQ ID NO: 15660 - protein, 276 aa, Homo sapiens
MSKPVDHVKRPMNAFMVWSRAQRRKMAQENPKMHNSEISKRLGAEWKLLTESEKRPFIDEAKRLRAMHMKEHPDYKYRPRRKPKTLLKKDKFAFPVPYGLGGVADAEHPALKAGAGLHAGAGGGLVPESLLANPEKAAAAAAAAAARVFFPQSAAAAAAAAAAAAAGSPYSLLDLGSKMAEISSSSSGLPYASSLGYPTAGAGAFHGAAAAAAAAAAAAGGHTHSHPSPGNPGYMIPCNCSAWPSPGLQPPLAYILLPGMGKPQLDPYPAAYAAAL

SEQ ID NO: 15661 - protein, 446 aa, Homo sapiens
MRPVRENSSGARSPRVPADLARSILISLPFPPDSLAHRPPSSAPTESQGLFTVAAPAPGAPSPPATLAHLLPAPAMYSLLETELKNPVGTPTQAAGTGGPAAPGGAGKSSANAAGGANSGGGSSGGASGGGGGTDQDRVKRPMNAFMVWSRGQRRKMALENPKMHNSEISKRLGADWKLLTDAEKRPFIDEAKRLRAVHMKEYPDYKYRPRRKTKTLLKKDKYSLPSGLLPPGAAAAAAAAAAAAAAASSPVGVGQRLDTYTHVNGWANGAYSLVQEQLGYAQPPSMSSPPPPPALPPMHRYDMAGLQYSPMMPPGAQSYMNVAAAAAAASGYGGMAPSATAAAAAAYGQQPATAAAAAAAAAAMSLGPMGSVVKSEPSSPPPAIASHSQRACLGDLRDMISMYLPPGGDAADAASPLPGGRLHGVHQHYQGAGTAVNGTVPLTHI

SEQ ID NO: 15662 - protein, 753 aa, Homo sapiens [sequence omitted]

SEQ ID NO: 15663 - protein, 474 aa, Homo sapiens
MVQQTNNAENTEALLAGESSDSGAGLELGIASSPTPGSTASTGGKADDPSWCKTPSGHIKRPMNAFMVWSQIERRKIMEQSPDMHNAEISKRLGKRWKLLKDSDKIPFIREAERLRLKHMADYPDYKYRPRKKVKSGNANSSSSAAASSKPGEKGDKVGGSGGGGHGGGGGGGSSNAGGGGGGASGGGANSKPAQKKSCGSKVAGGAGGGVSKPHAKLILAGGGGGGKAAAAAAASFAAEQAGAAALLPLGAAADHHSLYKARTPSASASASSAASASAALAAPGKHLAEKKVKRVYLFGGLGTSSSPVGGVGAGADPSDPLGLYEEEGAGCSPDAPSLSGRSSAASSPAAGRSPADHRGYASLRAASPAPSSAPSHASSSASSHSSSSSSSGSSSSDDEFEDDLLDLNPSSNFESMSLGSFSSSSALDRDLDFNFEPGSGSHFEFPDYCTPEVSEMISGDWLESSISNLVFTY

SEQ ID NO: 15664 - protein, 763 aa, Homo sapiens [sequence omitted]

SEQ ID NO: 15665 - protein, 828 aa, Homo sapiens
MSSKQATSPFACAADGEDAMTQDLTSREKEEGSDQHVASHLPLHPIMHNKPHSEELPTLVSTIQQDADWDSVLSSQQRMESENNKLCSLYSFRNTSTSPHKPDEGSRDREIMTSVTFGTPERRKGSLADVVDTLKQKKLEEMTRTEQEDSSCMEKLLSKDWKEKMERLNTSELLGEIKGTPESLAEKERQLSTMITQLISLREQLLAAHDEQKKLAASQIEKQRQQMDLARQQQEQIARQQQQLLQQQHKINLLQQQIQVQGHMPPLMIPIFPHDQRTLAAAAAAQQGFLFPPGITYKPGDNYPVQFIPSTMAAAAASGLSPLQLQKGHVSHPQINQRLKGLSDRFGRNLDTFEHGGGHSYNHKQIEQLYAAQLASMQVSPGAKMPSTPQPPNTAGTVSPTGIKNEKRGTSPVTQVKDEAAAQPLNLSSRPKTAEPVKSPTSPTQNLFPASKTSPVNLPNKSSIPSPIGGSLGRGSSLDILSSLNSPALFGDQDTVMKAIQEARKMREQIQREQQQQQPHGVDGKLSSINNMGLNSCRNEKERTRFENLGPQLTGKSNEDGKLGPGVIDLTRPEDAEGSKAMNGSAAKLQQYYCWPTGGATVAEARVYRDARGRASSEPHIKRPMNAFMVWAKDERRKILQAFPDMHNSNISKILGSRWKSMSNQEKQPYYEEQARLSKIHLEKYPNYKYKPRPKRTCIVDGKKLRIGEYKQLMRSRRQEMRQFFTVGQQPQIPITTGTGVVYPGAITMATTTPSPQMTSDCSSTSASPEPSLPVIQSTYGMKTDGGSLAGNEMINGEDEMEMYDDYEDDPKSDYSSENEAPEAVSAN

SEQ ID NO: 15666 - protein, 388 aa, Homo sapiens [sequence omitted]

SEQ ID NO: 15667 - protein, 446 aa, Homo sapiens [sequence omitted]

SEQ ID NO: 15668 - protein, 509 aa, Homo sapiens
MNLLDPFMKMTDEQEKGLSGAPSPTMSEDSAGSPCPSGSGSDTENTRPQENTFPKGEPDLKKESEEDKFPVCIREAVSQVLKGYDWTLVPMPVRVNGSSKNKPHVKRPMNAFMVWAQAARRKLADQYPHLHNAELSKTLGKLWRLLNESEKRPFVEEAERLRVQHKKDHPDYKYQPRRRKSVKNGQAEAEEATEQTHISPNAIFKALQADSPHSSSGMSEVHSPGEHSGQSQGPPTPPTTPKTDVQPGKADLKREGRPLPEGGRQPPIDFRDVDIGELSSDVISNIETFDVNEFDQYLPPNGHPGVPATHGQVTYTGSYGISSTAATPASAGHVWMSKQQAPPPPPQQPPQAPPAPQAPPQPQAAPPQQPAAPPQQPQAHTLTTLSSEPGQSQRTHIKTEQLSPSHYSEQQQHSPQQIAYSPFNLPHYSPSYPPITRSQYDYTDHQNSSSYYSHAAGQGTGLYSTFTYMNPAQRPMYTPIADTSGVPSIPQTHSPQHWEQPVYTQLTRP

SEQ ID NO: 15669 - protein, 785 aa, Homo sapiens
MSDQDHSMDEMTAVVKIEKGVGGNNGGNGNGGGAFSQARSSSTGSSSSTGGGGQESQPSPLALLAATCSRIESPNENSNNSQGPSQSGGTGELDLTATQLSQGANGWQIISSSSGATPTSKEQSGSSTNGSNGSESSKNRTVSGGQYVVAAAPNLQNQQVLTGLPGVMPNIQYQVIPQFQTVDGQQLQFAATGAQVQQDGSGQIQIIPGANQQIITNRGSGGNIIAAMPNLLQQAVPLQGLANNVLSGQTQYVTNVPVALNGNITLLPVNSVSAATLTPSSQAVTISSSGSQESGSQPVTSGTTISSASLVSSQASSSSFFTNANSYSTTTTTSNMGIMNFTTSGSSGTNSQGQTPQRVSGLQGSDALNIQQNQTSGGSLQAGQQKEGEQNQQTQQQQILIQPQLVQGGQALQALQAAPLSGQTFTTQAISQETLQNLQLQAVPNSGPIIIRTPTVGPNGQVSWQTLQLQNLQVQNPQAQTITLAPMQGVSLGQTSSSNTTLTPIASAASIPAGTVTVNAAQLSSMPGLQTINLSALGTSGIQVHPIQGLPLAIANAPGDHGAQLGLHGAGGDGIHDDTAGGEEGENSPDAQPQAGRRTRREACTCPYCKDSEGRGSGDPGKKKQHICHIQGCGKVYGKTSHLRAHLRWHTGERPFMCTWSYCGKRFTRSDELQRHKRTHTGEKKFACPECPKRFMRSDHLSKHIKTHQNKKGGPGVALSVGTLPLDSGAGSEGSGTATPSALITTNMVAMEAICPEGIARLANSGINVMQVADLQSINISGNGF

SEQ ID NO: 15670 - protein, 189 aa, Homo sapiens; identical to SEQ ID NO: 3950

SEQ ID NO: 15671 - protein, 879 aa, Homo sapiens
MAGGGGDLSTRRLNECISPVANEMNHLPAHSHDLQRMFTEDQGVDDRLLYDIVFKHFKRNKVEISNAIKKTFPFLEGLRDRDLITNKMFEDSQDSCRNLVPVQRVVYNVLSELEKTFNLPVLEALFSDVNMQEYPDLIHIYKGFENVIHDKLPLQESEEEEREERSGLQLSLEQGTGENSFRSLTWPPSGSPSHAGTTPPENGLSEHPCETEQINAKRKDTTSDKDDSLGSQQTNEQCAQKAEPTESCEQIAVQVNNGDAGREMPCPLPCDEESPEAELHNHGIQINSCSVRLVDIKKEKPFSNSKVECQAQARTHHNQASDIIVISSEDSEGSTDVDEPLEVFISAPRSEPVINNDNPLESNDEKEGQEATCSRPQIVPEPMDFRKLSTFRESFKKRVIGQDHDFSESSEEEAPAEASSGALRSKHGEKAPMTSRSTSTWRIPSRKRRFSSSDFSDLSNGEELQETCSSSLRRGSGSQPQEPENKKCSCVMCFPKGVPRSQEARTESSQASDMMDTMDVENNSTLEKHSGKRRKKRRHRSKVNGLQRGRKKDRPRKHLTLNNKVQKKRWQQRGRKANTRPLKRRRKRGPRIPKDENINFKQSELPVTCGEVKGTLYKERFKQGTSKKCIQSEDKKWFTPREFEIEGDRGASKNWKLSIRCGGYTLKVLMENKFLPEPPSTRKKRILESHNNTLVDPCEEHKKKNPDASVKFSEFLKKCSETWKTIFAKEKGKFEDMAKADKAHYEREMKTYIPPKGEKKKKFKDPNAPKRPPLAFFLFCSEYRPKIKGEHPGLSIDDVVKKLAGMWNNTAAADKQFYEKKAAKLKEKYKKDIAAYRAKGKPNSAKKRVVKAEKSKKKKEEEEDEEDEQEEENEEDDDK

SEQ ID NO: 15672 - protein, 689 aa, Homo sapiens
MFTMTRAMEEALFQHFMHQKLGIAYAIHKPFPFFEGLLDNSIITKRMYMESLEACRNLIPVSRVVHNILTQLERTFNLSLLVTLFSQINLREYPNLVTIYRSFKRVGASYEWQSRDTPILLEAPTGLAEGSSLHTPLALPPPQPPQPSCSPCAPRVSEPGTSSQQSDEILSESPSPSDPVLPLPALIQEGRSTSVTNDKLTSKMNAEEDSEEMPSLLTSTVQVASDNLIPQIRDKEDPQEMPHSPLGSMPEIRDNSPEPNDPEEPQEVSSTPSDKKGKKRKRCIWSTPKRRHKKKSLPGGTASSRHGIQKKLKRVDQVPQKKDDSTCNSTVETRAQKARTECARKSRSEEIIDGTSEMNEGKRSQKTPSTPRRVTQGAASPGHGIQEKLQVVDKVTQRKDDSTWNSEVMMRVQKARTKCARKSRLKEKKKEKDICSSSKRRFQKNIHRRGKPKSDTVDFHCSKLPVTCGEAKGILYKKKMKHGSSVKCIRNEDGTWLTPNEFEVEGKGRNAKNWKRNIRCEGMTLGELLKRKNSDECEVCCQGGQLLCCGTCPRVFHEDCHIPPVEAKRMLWSCTFCRMKRSSGSQQCHHVSKTLERQMQPQDQLIRDYGEPFQEAMWLDLVKERLITEMYTVAWFVRDMRLMFRNHKTFYKASDFGQVGLDLEAEFEKDLKDVLGFHEANDGGFWTLP

SEQ ID NO: 15673 - protein, 867 aa, Homo sapiens
MAQQGQQGQMASGDSNLNFRMVAEIQNVEGQNLQEQVCPEPIFRFFRENKVEIASAITRPFPFLMGLRDRSFISEQMYEHFQEAFRNLVPVTRVMYCVLSELEKTFGWSHLEALFSRINLMAYPDLNEIYRSFQNVCYEHSPLQMNNVNDLEDRPRLLPYGKQENSNACHEMDDIAVPQEALSSSPRCEPGFSSESCEQLALPKAGGGDAEDAPSLLPGGGVSCKLAIQIDEGESEEMPKLLPYDTEVLESNGMIDAARTYSTAPGEKQGEEEGRNSPRKRNQDKEKYQESPEGRDKETFDLKTPQVTNEGEPEKGLCLLPGEGEEGSDDCSEMCDGEEPQEASSSLARCGSVSCLSAETFDLKTPQVTNEGEPEKELSLLPGEGEEGSDDCSEMCDGEERQEASSSLARRGSVSSELENHPMNEEGESEELASSLLYDNVPGAEQSAYENEKCSCVMCFSEEVPGSPEARTESDQACGTMDTVDIANNSTLGKPKRKRRKKRGHGWSRMRMRRQENSQQNDNSKADGQVVSSEKKANVNLKDLSKIRGRKRGKPGTRFTQSDRAAQKRVRSRASRKHKDETVDFKAPLLPVTCGGVKGILHKKKLQQGILVKCIQTEDGKWFTPTEFEIKGGHARSKNWRLSVRCGGWPLRWLMENGFLPDPPRIRYRKKKRILKSQNNSSVDPCMRNLDECEVCRDGGELFCCDTCSRVFHEDCHIPPVEAERTPWNCIFCRMKESPGSQQCCQESEVLERQMCPEEQLKCEFLLLKVYCCSESSFFAKIPYYYYIREACQGLKEPMWLDKIKKRLNEHGYPQVEGFVQDMRLIFQNHRASYKYKDFGQMGFRLEAEFEKNFKEVFAIQETNGNN

SEQ ID NO: 15674 - protein, 580 aa, Homo sapiens
MAGGGSDLSTRGLNGGVSQVANEMNHLPAHSQSLQRLFTEDQDVDEGLVYDTVFKHFKRHKLEISNAIKKTFPFLEGLRDRELITNKMFEDSEDSCRNLVPVQRVVYNVLSELEKTFNLSVLEALFSEVNMQEYPDLIHIYKSFKNAIQDKLSFQESDRKEREERPDIKLSLKQGEVPESPEARKESDQACGKMDTVDIANNSTLGKPKRKRRKKKGHGWSRMGTRTQKNNQQNDNSKADGQLVSSEKKANMNLKDLSKIRGRKRGKPGTHFTQSDRAPQKRVRSRASRKHKDETVDFQAPLLPVTCGGVKGILHKEKLEQGTLAKCIQTEDGKWFTPMEFEIKGGYARSKNWRLSVRCGGWPLRRLMEEGSLPNPPRIYYRNKKRILKSQNNSSVDPCMRNLDECEVCRDGGELFCCDTCSRVFHEDCHIPPVESEKTPWNCIFCRMKESPGSQQCCQESEVLERQMCPEEQLKCEFLLLKVYCCSESSFFAKIPYYYYIREACQGLKEPMWLDKIKKRLNEHGYPQVEGFVQDMRLIFQNHRASYKYKDFGQMGLRLEAEFEKDFKEVFAIQETNGNS

SEQ ID NO: 15675 - protein, 613 aa, Homo sapiens
MSDPQTSMAATAAVSPSDYLQPAASTTQDSQPSPLALLAATCSKIGPPAVEAAVTPPAPPQPTPRKLVPIKPAPLPLSPGKNSFGILSSKGNILQIQGSQLSASYPGGQLVFAIQNPTMINKGTRSNANIQYQAVPQIQASNSQTIQVQPNLTNQIQIIPGTNQAIITPSPSSHKPVPIKPAPIQKSSTTTTPVQSGANVVKLTGGGGNVTLTLPVNNLVNASDTGAPTQLLTESPPTPLSKTNKKARKKSLPASQPPVAVAEQVETVLIETTADNIIQAGNNLLIVQSPGGGQPAVVQQVQVVPPKAEQQQVVQIPQQALRVVQAASATLPTVPQKPSQNFQIQAAEPTPTQVYIRTPSGEVQTVLVQDSPPATAAATSNTTCSSPASRAPHLSGTSKKHSAAILRKERPLPKIAPAGSIISLNAAQLAAAAQAMQTININGVQVQGVPVTITNTGGQQQLTVQNVSGNNLTISGLSPTQIQLQMEQALAGETQPGEKRRRMACTCPNCKDGEKRSGEQGKKKHVCHIPDCGKTFRKTSLLRAHVRLHTGERPFVCNWFFCGKRFTRSDELQRHARTHTGDKRFECAQCQKRFMRSDHLTKHYKTHLVTKNL

SEQ ID NO: 15676 - protein, 781 aa, Homo sapiens
MTAPEKPVKQEEMAALDVDSGGGGGGGGGHGEYLQQQQQHGNGAVAAAAAAQDTQPSPLALLAATCSKIGPPSPGDDEEEAAAAAGAPAAAGATGDLASAQLGGAPNRWEVLSATPTTIKDEAGNLVQIPSAATSSGQYVLPLQNLQNQQIFSVAPGSDSSNGTVSSVQYQVIPQIQSADGQQVQIGFTGSSDNGGINQESSQIQIIPGSNQTLLASGTPSANIQNLIPQTGQVQVQGVAIGGSSFPGQTQVVANVPLGLPGNITFVPINSVDLDSLGLSGSSQTMTAGINADGHLINTGQAMDSSDNSERTGERVSPDINETNTDTDLFVPTSSSSQLPVTIDSTGILQQNTNSLTTSSGQVHSSDLQGNYIQSPVSEETQAQNIQVSTAQPVVQHLQLQESQQPTSQAQIVQGITPQTIHGVQASGQNISQQALQNLQLQLNPGTFLIQAQTVTPSGQVTWQTFQVQGVQNLQNLQIQNTAAQQITLTPVQTLTLGQVAAGGAFTSTPVSLSTGQLPNLQTVTVNSIDSAGIQLHPGENADSPADIRIKEEEPDPEEWQLSGDSTLNTNDLTHLRVQVVDEEGDQQHQEGKRLRRVACTCPNCKEGGGRGTNLGKKKQHICHIPGCGKVYGKTSHLRAHLRWHSGERPFVCNWMYCGKRFTRSDELQRHRRTHTGEKKFVCPECSKRFMRSDHLAKHIKTHQNKKGIHSSSTVLASVEAARDDTLITAGGTTLILANIQQGSVSGIGTVNTSATSNQDILTNTEIPLQLVTVSGNETME

SEQ ID NO: 15677 - protein, 784 aa, Homo sapiens
MSDQKKEEEEEAAAAAAMATEGGKTSEPENNNKKPKTSGSQDSQPSPLALLAATCSKIGTPGENQATGQQQIIIDPSQGLVQLQNQPQQLELVTTQLAGNAWQLVASTPPASKENNVSQPASSSSSSSSSNNGSASPTKTKSGNSSTPGQFQVIQVQNPSGSVQYQVIPQLQTVEGQQIQINPTSSSSLQDLQGQIQLISAGNNQAILTAANRTASGNILAQNLANQTVPVQIRPGVSIPLQLQTLPGTQAQVVTTLPINIGGVTLALPVINNVAAGGGTGQVGQPAATADSGTSNGNQLVSTPTNTTTSASTMPESPSSSTTCTTTASTSLTSSDTLVSSADTGQYASTSASSSERTIEESQTPAATESEAQSSSQLQPNGMQNAQDQSNSLQQVQIVGQPILQQIQIQQPQQQIIQAIPPQSFQLQSGQTIQTIQQQPLQNVQLQAVNPTQVLIRAPTLTPSGQISWQTVQVQNIQSLSNLQVQNAGLSQQLTITPVSSSGGTTLAQIAPVAVAGAPITLNTAQLASVPNLQTVSVANLGAAGVQVQGVPVTITSVAGQQQGQDGVKVQQATIAPVTVAVGGIANATIGAVSPDQLTQVHLQQGQQTSDQEVQPGKRLRRVACSCPNCREGEGRGSNEPGKKKQHICHIEGCGKVYGKTSHLRAHLRWHTGERPFICNWMFCGKRFTRSDELQRHRRTHTGEKRFECPECSKRFMRSDHLSKHVKTHQNKKGGGTALAIVTSGELDSSVTEVLGSPRIVTVAAISQDSNPATPNVSTNMEEF

SEQ ID NO: 15678 - protein, 398 aa, Homo sapiens
MAAVAVLRNDSLQAFLQDRTPSASPDLGKHSPLALLAATCSRIGQPGAAAPPDFLQVPYDPALGSPSRLFHPWTADMPAHSPGALPPPHPSLGLTPQKTHLQPSFGAAHELPLTPPADPSYPYEFSPVKMLPSSMAALPASCAPAYVPYAAQAALPPGYSNLLPPPPPPPPPPTCRQLSPNPAPDDLPWWSIPQAGAGPGASGVPGSGLSGACAGAPHAPRFPASAAAAAAAAAALQRGLVLGPSDFAQYQSQIAALLQTKAPLAATARRCRRCRCPNCQAAGGAPEAEPGKKKQHVCHVPGCGKVYGKTSHLKAHLRWHTGERPFVCNWLFCGKSFTRSDELQRHLRTHTGEKRFACPECGKRFMRSDHLAKHVKTHQNKKLKVAEAGVKREDARDL

SEQ ID NO: 15679 - protein, 376 aa, Homo sapiens
MLTAVCGSLGSQHTEAPHASPPRLDLQPLQTYQGHTSPEAGDYPSPLQPGELQSLPLGPEVDFSQGYELPGASSRVTCEDLESDSPLAPGPFSKLLQPDMSHHYESWFRPTHPGAEDGSWWDLHPGTSWMDLPHTQGALTSPGHPGALQAGLGGYVGDHQLCAPPPHPHAHHLLPAAGGQHLLGPPDGAKALEVAAPESQGLDSSLDGAARPKGSRRSVPRSSGQTVCRCPNCLEAERLGAPCGPDGGKKKHLHNCHIPGCGKAYAKTSHLKAHLRWHSGDRPFVCNWLFCGKRFTRSDELQRHLQTHTGTKKFPCAVCSRVFMRSDHLAKHMKTHEGAKEEAAGAASGEGKAGGAVEPPGGKGKREAEGSVAPSN

SEQ ID NO: 15680 - protein, 431 aa, Homo sapiens
MASSLLEEEVHYGSSPLAMLTAACSKFGGSSPLRDSTTLGKAGTKKPYSVGSDLSASKTMGDAYPAPFTSTNGLLSPAGSPPAPTSGYANDYPPFSHSFPGPTGTQDPGLLVPKGHSSSDCLPSVYTSLDMTHPYGSWYKAGIHAGISPGPGNTPTPWWDMHPGGNWLGGGQGQGDGLQGTLPTGPAQPPLNPQLPTYPSDFAPLNPAPYPAPHLLQPGPQHVLPQDVYKPKAVGNSGQLEGSGGAKPPRGASTGGSGGYGGSGAGRSSCDCPNCQELERLGAAAAGLRKKPIHSCHIPGCGKVYGKASHLKAHLRWHTGERPFVCNWLFCGKRFTRSDELERHVRTHTREKKFTCLLCSKRFTRSDHLSKHQRTHGEPGPGPPPSGPKELGEGRSTGEEEASQTPRPSASPATPEKAPGGSPEQSNLLEI

SEQ ID NO: 15681 - protein, 490 aa, Homo sapiens
MLAATCNKIGSPSPSPSSLSDSSSSFGKGFHPWKRSSSSSSASCNVVGSSLSSFGVSGASRNGGSSSAAAAAAAAAAAAAALVSDSFSCGGSPGSSAFSLTSSSAAAAAAAAAAAASSSPFANDYSVFQAPGVSGGSGGGGGGGGGGSSAHSQDGSHQPVFISKVHTSVDGLQGIYPRVGMAHPYESWFKPSHPGLGAAGEVGSAGASSWWDVGAGWIDVQNPNSAAALPGSLHPAAGGLQTSLHSPLGGYNSDYSGLSHSAFSSGASSHLLSPAGQHLMDGFKPVLPGSYPDSAPSPLAGAGGSMLSAGPSAPLGGSPRSSARRYSGRATCDCPNCQEAERLGPAGASLRRKGLHSCHIPGCGKVYGKTSHLKAHLRWHTGERPFVCNWLFCGKRFTRSDELQRHLRTHTGEKRFACPVCNKRFMRSDHLSKHVKTHSGGGGGGGSAGSGSGGKKGSDTDSEHSAAGSPPCHSPELLQPPEPGHRNGLE

SEQ ID NO: 15682 - protein, 484 aa, Homo sapiens
MATSILGEEPRFGTTPLAMLAATCNKIGNTSPLTTLPESSAFAKGGFHPWKRSSSSCNLGSSLSGFAVATGGRGSGGLAGGSGAANSAFCLASTSPTSSAFSSDYGGLFSNSAAAAAAAAGVSPQEAGGQSAFISKVHTTAADGLYPRVGMAHPYESWYKSGFHSTLAAGEVTNGAASSWWDVHSSPGSWLEVQNPAGGLQSSLHSGAPQASLHSQLGTYNPDFSSLTHSAFSSTGLGSSAAAASHLLSTSQHLLAQDGFKPVLPSYSDSSAAVAAAAASAMISGAAAAAAGGSSARSARRYSGRATCDCPNCQEAERLGPAGASLRRKGLHSCHIPGCGKVYGKTSHLKAHLRWHTGERPFVCNWLFCGKRFTRSDELQRHLRTHTGEKRFACPVCNKRFMRSDHLSKHIKTHNGGGGGKKGSDSDTDASNLETPRSESPDLILHDSGVSAARAAAAAAAAAAAAAAAASAGGKEAASGPNDS

SEQ ID NO: 15683 - protein, 335 aa, Homo sapiens
MGSASPGLSSVSPSHLLLPPDTVSRTGLEKAAAGAVGLERRDWSPSPPATPEQGLSAFYLSYFDMLYPEDSSWAAKAPGASSREEPPEEPEQCPVIDSQAPAGSLDLVPGGLTLEEHSLEQVQSMVVGEVLKDIETACKLLNITADPMDWSPSNVQKWLLWTEHQYRLPPMGKAFQELAGKELCAMSEEQFRQRSPLGGDVLHAHLDIWKSAAWMKERTSPGAIHYCASTSEESWTDSEVDSSCSGQPIHLWQFLKELLLKPHSYGRFIRWLNKEKGIFKIEDSAQVARLWGIRKNRPAMNYDKLSRSIRQYYKKGIIRKPDISQRLVYQFVHPI

SEQ ID NO: 15684 - protein, 270 aa, Homo sapiens
MLQACKMEGFPLVPPPSEDLVPYDTDLYQRQTHEYYPYLSSDGESHSDHYWDFHPHHVHSEFESFAENNFTELQSVQPPQLQQLYRHMELEQMHVLDTPMVPPHPSLGHQVSYLPRMCLQYPSLSPAQPSSDEEEGERQSPPLEVSDGEADGLEPGPGLLPGETGSKKKIRLYQFLLDLLRSGDMKDSIWWVDKDKGTFQFSSKHKEALAHRWGIQKGNRKKMTYQKMARALRNYGKTGEVKKVKKKLTYQFSGEVLGRGGLAERRHPPH

SEQ ID NO: 15685 - protein, 262 aa, Homo sapiens
MLALEAAQLDGPHFSCLYPDGVFYDLDSCKHSSYPDSEGAPDSLWDWTVAPPVPATPYEAFDPAAAAFSHPQAAQLCYEPPTYSPAGNLELAPSLEAPGPGLPAYPTENFASQTLVPPAYAPYPSPVLSEEEDLPLDSPALEVSDSESDEALVAGPEGKGSEAGTRKKLRLYQFLLGLLTRGDMRECVWWVEPGAGVFQFSSKHKELLARRWGQQKGNRKRMTYQKLARALRNYAKTGEIRKVKRKLTYQFDSALLPAVRRA

SEQ ID NO: 15686 - protein, 248 aa, Homo sapiens
MTCVEQDKLGQAFEDAFEVLRQHSTGDLQYSPDYRNYLALINHRPHVKGNSSCYGVLPTEEPVYNWRTVINSAADFYFEGNIHQSLQNITENQLVQPTLLQQKGGKGRKKLRLFEYLHESLYNPEMASCIQWVDKTKGIFQFVSKNKEKLAELWGKRKGNRKTMTYQKMARALRNYGRSGEITKIRRKLTYQFSEAILQRLSPSYFLGKEIFYSQCVQPDQEYLSLNNWNANYNYTYANYHELNHHDC

SEQ ID NO: 15687 - protein, 430 aa, Homo sapiens
MASSAKSAEMPTISKTVNPTPDPHQEYLDPRITIALFEIGSHSPSSWGSLPFLKNSSHQVTEQQTAQKFNNLLKEIKDILKNMAGFEEKITEAKELFEETNITEDVSAHKENIRGLDKINEMLSTNLPVSLAPEKEDNEKKQEMILETNITEDVSAHKENIRGLDKINEMLSTNLPVSLAPEKEDNEKKQQMIMENQNSENTAQVFARDLVNRLEEKKVLNETQQSQEKAKNRLNVQEETMKIRNNMEQLLQEAEHWSKQHTELSKLIKSYQKSQKDISETLGNNGVGFQTQPNNEVSAKHELEEQVKKLSHDTYSLQLMAALLENECQILQQRVEILKELHHQKQGTLQEKPIQINYKQDKKNQKPSEAKKVEMYKQNKQAMKGTFWKKDRSCRSLDVCLNKKACNTQFNIHVARKALRGKMRSASSLR

SEQ ID NO: 15688 - protein, 1147 aa, Homo sapiens
MDEPPFSEAALEQALGEPCDLDAALLTDIEDMLQLINNQDSDFPGLFDPPYAGSGAGGTDPASPDTSSPGSLSPPPATLSSSLEAFLSGPQAAPSPLSPPQPAPTPLKMYPSMPAFSPGPGIKEESVPLSILQTPTPQPLPGALLPQSFPAPAPPQFSSTPVLGYPSPPGGFSTGSPPGNTQQPLPGLPLASPPGVPPVSLHTQVQSVVPQQLLTVTAAPTAAPVTTTVTSQIQQVPVLLQPHFIKADSLLLTAMKTDGATVKAAGLSPLVSGTTVQTGPLPTLVSGGTILATVPLVVDAEKLPINRLAAGSKAPASAQSRGEKRTAHNAIEKRYRSSINDKIIELKDLVVGTEAKLNKSAVLRKAIDYIRFLQHSNQKLKQENLSLRTAVHKSKSLKDLVSACGSGGNTDVLMEGVKTEVEDTLTPPPSDAGSPFQSSPLSLGSRGSGSGGSGSDSEPDSPVFEDSKAKPEQRPSLHSRGMLDRSRLALCTLVFLCLSCNPLASLLGARGLPSPSDTTSVYHSPGRNVLGTESRDGPGWAQWLLPPVVWLLNGLLVLVSLVLLFVYGEPVTRPHSGPAVYFWRHRKQADLDLARGDFAQAAQQLWLALRALGRPLPTSHLDLACSLLWNLIRHLLQRLWVGRWLAGRAGGLQQDCALRVDASASARDAALVYHKLHQLHTMGKHTGGHLTATNLALSALNLAECAGDAVSVATLAEIYVAAALRVKTSLPRALHFLTRFFLSSARQACLAQSGSVPPAMQWLCHPVGHRFFVDGDWSVLSTPWESLYSLAGNPVDPLAQVTQLFREHLLERALNCVTQPNPSPGSADGDKEFSDALGYLQLLNSCSDAAGAPAYSFSISSSMATTTGVDPVAKWWASLTAVVIHWLRRDEEAAERLCPLVEHLPRVLQESERPLPRAALHSFKAARALLGCAKAESGPASLTICEKASGYLQDSLATTPASSSIDKAVQLFLCDLLLVVRTSLWRQQQPPAPAPAAQGTSSRPQASALELRGFQRDLSSLRRLAQSFRPAMRRVFLHEATARLMAGASPTRTHQLLDRSLRRRAGPGGKGGAVAELEPRPTRREHAEALLLASCYLPPGFLSAPGQRVGMLAEAARTLEKLGDRRLLHDCQQMLMRLGGGTTVTSS

SEQ ID NO: 15689 - protein, 1141 aa, Homo sapiens
MDDSGELGGLETMETLTELGDELTLGDIDEMLQFVSNQVGEFPDLFSEQLCSSFPGSGGSGSSSGSSGSSSSSSNGRGSSSGAVDPSVQRSFTQVTLPSFSPSAASPQAPTLQVKVSPTSVPTTPRATPILQPRPQPQPQPQTQLQQQTVMITPTFSTTPQTRIIQQPLIYQNAATSFQVLQPQVQSLVTSSQVQPVTIQQQVQTVQAQRVLTQTANGTLQTLAPATVQTVAAPQVQQVPVLVQPQIIKTDSLVLTTLKTDGSPVMAAVQNPALTALTTPIQTAALQVPTLVGSSGTILTTMPVMMGQEKVPIKQVPGGVKQLEPPKEGERRTTHNIIEKRYRSSINDKIIELKDLVMGTDAKMHKSGVLRKAIDYIKYLQQVNHKLRQENMVLKLANQKNKLLKGIDLGSLVDNEVDLKIEDFNQNVLLMSPPASDSGSQAGFSPYSIDSEPGSPLLDDAKVKDEPDSPPVALGMVDRSRILLCVLTFLCLSFNPLTSLLQWGGAHDSDQHPHSGSGRSVLSFESGSGGWFDWMMPTLLLWLVNGVIVLSVFVKLLVHGEPVIRPHSRSSVTFWRHRKQADLDLARGDFAAAAGNLQTCLAVLGRALPTSRLDLACSLSWNVIRYSLQKLRLVRWLLKKVFQCRRATPATEAGFEDEAKTSARDAALAYHRLHQLHITGKLPAGSACSDVHMALCAVNLAECAEEKIPPSTLVEIHLTAAMGLKTRCGGKLGFLASYFLSRAQSLCGPEHSAVPDSLRWLCHPLGQKFFMERSWSVKSAAKESLYCAQRNPADPIAQVHQAFCKNLLERAIESLVKPQAKKKAGDQEEESCEFSSALEYLKLLHSFVDSVGVMSPPLSRSSVLKSALGPDIICRWWTSAITVAISWLQGDDAAVRSHFTKVERIPKALEVTESPLVKAIFHACRAMHASLPGKADGQQSSFCHCERASGHLWSSLNVSGATSDPALNHVVQLLTCDLLLSLRTALWQKQASASQAVGETYHASGAELAGFQRDLGSLRRLAHSFRPAYRKVFLHEATVRLMAGASPTRTHQLLEHSLRRRTTQSTKHGEVDAWPGQRERATAILLACRHLPLSFLSSPGQRAVLLAEAARTLEKVGDRRSCNDCQQMIVKLGGGTAIAAS

SEQ ID NO: 15690 - protein, 508 aa, Homo sapiens
MLPTQAGAAAALGRGSALGGSLNRTPTGRPGGGGGTRGANGGRVPGNGAGLGPGRLEREAAAAAATTPAPTAGALYSGSEGDSESGEEEELGAERRGLKRSLSEMEIGMVVGGPEASAAATGGYGPVSGAVSGAKPGKKTRGRVKIKMEFIDNKLRRYTTFSKRKTGIMKKAYELSTLTGTQVLLLVASETGHVYTFATRKLQPMITSETGKALIQTCLNSPDSPPRSDPTTDQRMSATGFEETDLTYQVSESDSSGETKDTLKPAFTVTNLPGTTSTIQTAPSTSTTMQVSSGPSFPITNYLAPVSASVSPSAVSSANGTVLKSTGSGPVSSGGLMQLPTSFTLMPGGAVAQQVPVQAIQVHQAPQQASPSRDSSTDLTQTSSSGTVTLPATIMTSSVPTTVGGHMMYPSPHAVMYAPTSGLGDGSLTVLNAFSQAPSTMQVSHSQVQEPGGVPQVFLTASSGTVQIPVSAVQLHQMAVIGQQAGSSSNLTELQVVNLDTAHSTKSE

SEQ ID NO: 15691 - protein, 204 aa, Homo sapiens
MQSYASAMLSVFNSDDYSPAVQENIPALRRSSSFLCTESCNSKYQCETGENSKGNVQDRVKRPMNAFIVWSRDQRRKMALENPRMRNSEISKQLGYQWKMLTEAEKWPFFQEAQKLQAMHREKYPNYKYRPRRKAKMLPKNCSLLPADPASVLCSEVQLDNRLYRDDCTKATHSRMEHQLGHLPPINAASSPQQRDRYSHWTKL

SEQ ID NO: 15692 - protein, 709 aa, Homo sapiens
MAETLEFNDVYQEVKGSMNDGRLRLSRQGIIFKNSKTGKVDNIQAGELTEGIWRRVALGHGLKLLTKNGHVYKYDGFRESEFEKLSDFFKTHYRLELMEKDLCVKGWNWGTVKFGGQLLSFDIGDQPVFEIPLSNVSQCTTGKNEVTLEFHQNDDAEVSLMEVRFYVPPTQEDGVDPVEAFAQNVLSKADVIQATGDAICIFRELQCLTPRGRYDIRIYPTFLHLHGKTFDYKIPYTTVLRLFLLPHKDQRQMFFVISLDPPIKQGQTRYHFLILLFSKDEDISLTLNMNEEEVEKRFEGRLTKNMSGSLYEMVSRVMKALVNRKITVPGNFQGHSGAQCITCSYKASSGLLYPLERGFIYVHKPPVHIRFDEISFVNFARGTTTTRSFDFEIETKQGTQYTFSSIEREEYGKLFDFVNAKKLNIKNRGLKEGMNPSYDEYADSDEDQHDAYLERMKEEGKIREENANDSSDDSGEETDESFNPGEEEEDVAEEFDSNASASSSSNEGDSDRDEKKRKQLKKAKMAKDRKSRKKPVEVKKGKDPNAPKRPMSAYMLWLNASREKIKSDHPGISITDLSKKAGEIWKGMSKEKKEEWDRKAEDARRDYEKAMKEYEGGRGESSKRDKSKKKKKVKVKMEKKSTPSRGSSSKSSSRQLSESFKSKEFVSSDESSSGENKSKKKRRRSEDSEEEELASTPPSSEDSASGSDE

SEQ ID NO: 15693 - protein, 1047 aa, Homo sapiens
MDAEAEDKTLRTRSKGTEVPMDSLIQELSVAYDCSMAKKRTAEDQALGVPVNKRKSLLMKPRHYSPKADCQEDRSDRTEDDGPLETHGHSTAEEIMIKPMDESLLSTAQENSSRKEDRYSCYQELMVKSLMHLGKFEKNVSVQTVSENLNDSGIQSLKAESDEADECFLIHSDDGRDKIDDSQPPFCSSDDNESNSESAENGWDSGSNFSEETKPPRVPKYVLTDHKKDLLEVPEIKTEGDKFIPCENRCDSETERKDPQNALAEPLDGNAQPSFPDVEEEDSESLAVMTEEGSDLEKAKGNLSLLEQAIALQAERGCVFHNTYKELDRFLLEHLAGERRQTKVIDMGGRQIFNNKHSPRPEKRETKCPIPGCDGTGHVTGLYPHHRSLSGCPHKVRVPLEILAMHENVLKCPTPGCTGRGHVNSNRNTHRSLSGCPIAAAEKLAMSQDKNQLDSPQTGQCPDQAHRTSLVKQIEFNFPSQAITSPRATVSKEQEKFGKVPFDYASFDAQVFGKRPLIQTVQGRKTPPFPESKHFPNPVKFPNRLPSAGAHTQSPGRASSYSYGQCSEDTHIAAAAAILNLSTRCREATDILSNKPQSLHAKGAEIEVDENGTLDLSMKKNRILDKSAPLTSSNTSIPTPSSSPFKTSSILVNAAFYQALCDQEGWDTPINYSKTHGKTEEEKEKDPVSSLENLEEKKFPGEASIPSPKPKLHARDLKKELITCPTPGCDGSGHVTGNYASHRSVSGCPLADKTLKSLMAANSQELKCPTPGCDGSGHVTGNYASHRSLSGCPRARKGGVKMTPTKEEKEDPELKCPVIGCDGQGHISGKYTSHRTASGCPLAAKRQKENPLNGASLSWKLNKQELPHCPLPGCNGLGHVNNVFVTHRSLSGCPLNAQVIKKGKVSEELMTIKLKATGGIESDEEIRHLDEEIKELNESNLKIEADMMKLQTQITSMESNLKTIEEENKLIEQNNESLLKELAGLSQALISSLADIQLPQMGPISEQNFEAYVNTLTDMYSNLERDYSPECKALLESIKQAVKGIHV

SEQ ID NO: 15694 - protein, 750 aa, Homo sapiens
MSQWYELQQLDSKFLEQVHQLYDDSFPMEIRQYLAQWLEKQDWEHAANDVSFATIRFHDLLSQLDDQYSRFSLENNFLLQHNIRKSKRNLQDNFQEDPIQMSMIIYSCLKEERKILENAQRFNQAQSGNIQSTVMLDKQKELDSKVRNVKDKVMCIEHEIKSLEDLQDEYDFKCKTLQNREHETNGVAKSDQKQEQLLLKKMYLMLDNKRKEVVHKIIELLNVTELTQNALINDELVEWKRRQQSACIGGPPNACLDQLQNWFTIVAESLQQVRQQLKKLEELEQKYTYEHDPITKNKQVLWDRTFSLFQQLIQSSFVVERQPCMPTHPQRPLVLKTGVQFTVKLRLLVKLQELNYNLKVKVLFDKDVNERNTVKGFRKFNILGTHTKVMNMEESTNGSLAAEFRHLQLKEQKNAGTRTNEGPLIVTEELHSLSFETQLCQPGLVIDLETTSLPVVVISNVSQLPSGWASILWYNMLVAEPRNLSFFLTPPCARWAQLSEVLSWQFSSVTKRGLNVDQLNMLGEKLLGPNASPDGLIPWTRFCKENINDKNFPFWLWIESILELIKKHLLPLWNDGCIMGFISKERERALLKDQQPGTFLLRFSESSREGAITFTWVERSQNGGEPDFHAVEPYTKKELSAVTFPDIIRNYKVMAAENIPENPLKYLYPNIDKDHAFGKYYSRPKEAPEPMELDGPKGTGYIKTELISVSEVHPSRLQTTDNLLPMSPEEFDEVSRIVGSVEFDSMMNTV

SEQ ID NO: 15695 - protein, 851 aa, Homo sapiens
MAQWEMLQNLDSPFQDQLHQLYSHSLLPVDIRQYLAVWIEDQNWQEAALGSDDSKATMLFFHFLDQLNYECGRCSQDPESLLLQHNLRKFCRDIQPFSQDPTQLAEMIFNLLLEEKRILIQAQRAQLEQGEPVLETPVESQQHEIESRILDLRAMMEKLVKSISQLKDQQDVFCFRYKIQAKGKTPSLDPHQTKEQKILQETLNELDKRRKEVLDASKALLGRLTTLIELLLPKLEEWKAQQQKACIRAPIDHGLEQLETWFTAGAKLLFHLRQLLKELKGLSCLVSYQDDPLTKGVDLRNAQVTELLQRLLHRAFVVETQPCMPQTPHRPLILKTGSKFTVRTRLLVRLQEGNESLTVEVSIDRNPPQLQGFRKFNILTSNQKTLTPEKGQSQGLIWDFGYLTLVEQRSGGSGKGSNKGPLGVTEELHIISFTVKYTYQGLKQELKTDTLPVVIISNMNQLSIAWASVLWFNLLSPNLQNQQFFSNPPKAPWSLLGPALSWQFSSYVGRGLNSDQLSMLRNKLFGQNCRTEDPLLSWADFTKRESPPGKLPFWTWLDKILELVHDHLKDLWNDGRIMGFVSRSQERRLLKKTMSGTFLLRFSESSEGGITCSWVEHQDDDKVLIYSVQPYTKEVLQSLPLTEIIRHYQLLTEENIPENPLRFLYPRIPRDEAFGCYYQEKVNLQERRKYLKHRLIVVSNRQVDELQQPLELKPEPELESLELELGLVPEPELSLDLEPLLKAGLDLGPELESVLESTLEPVIEPTLCMVSQTVPEPDQGPVSQPVPEPDLPCDLRHLNTEPMEIFRNCVKIEEIMPNGDPLLAGQNTVDEVYVSRPSHFYTDGPLMPSDF

SEQ ID NO: 15696 - protein, 770 aa, Homo sapiens
MAQWNQLQQLDTRYLEQLHQLYSDSFPMELRQFLAPWIESQDWAYAASKESHATLVFHNLLGEIDQQYSRFLQESNVLYQHNLRRIKQFLQSRYLEKPMEIARIVARCLWEESRLLQTAATAAQQGGQANHPTAAVVTEKQQMLEQHLQDVRKRVQDLEQKMKVVENLQDDFDFNYKTLKSQGDMQDLNGNNQSVTRQKMQQLEQMLTALDQMRRSIVSELAGLLSAMEYVQKTLTDEELADWKRRQQIACIGGPPNICLDRLENWITSLAESQLQTRQQIKKLEELQQKVSYKGDPIVQHRPMLEERIVELFRNLMKSAFVVERQPCMPMHPDRPLVIKTGVQFTTKVRLLVKFPELNYQLKIKVCIDKDSGDVAALRGSRKFNILGTNTKVMNMEESNNGSLSAEFKHLTLREQRCGNGGRANCDASLIVTEELHLITFETEVYHQGLKIDLETHSLPVVVISNICQMPNAWASILWYNMLTNNPKNVNFFTKPPIGTWDQVAEVLSWQFSSTTKRGLSIEQLTTLAEKLLGPGVNYSGCQITWAKFCKENMAGKGFSFWVWLDNIIDLVKKYILALWNEGYIMGFISKERERAILSTKPPGTFLLRFSESSKEGGVTFTWVEKDISGKTQIQSVEPYTKQQLNNMSFAEIIMGYKIMDATNILVSPLVYLYPDIPKEEAFGKYCRPESQEHPEADPGSAAPYLKTKFICVTPTTCSNTIDLPMSPRTLDSLMQFGNNGEGAEPSAGGQFESLTFDMELTSECATSPM

SEQ ID NO: 15697 - protein, 748 aa, Homo sapiens
MSQWNQVQQLEIKFLEQVDQFYDDNFPMEIRHLLAQWIENQDWEAASNNETMATILLQNLLIQLDEQLGRVSKEKNLLLIHNLKRIRKVLQGKFHGNPMHVAVVISNCLREERRILAAANMPVQGPLEKSLQSSSVSERQRNVEHKVAAIKNSVQMTEQDTKYLEDLQDEFDYRYKTIQTMDQSDKNSAMVNQEVLTLQEMLNSLDFKRKEALSKMTQIIHETDLLMNTMLIEELQDWKRRQQIACIGGPLHNGLDQLQNCFTLLAESLFQLRRQLEKLEEQSTKMTYEGDPIPMQRTHMLERVTFLIYNLFKNSFVVERQPCMPTHPQRPLVLKTLIQFTVKLRLLIKLPELNYQVKVKASIDKNVSTLSNRRFVLCGTNVKAMSIEESSNGSLSVEFRHLQPKEMKSSAGGKGNEGCHMVTEELHSITFETQICLYGLTIDLETSSLPVVMISNVSQLPNAWASIIWYNVSTNDSQNLVFFNNPPPATLSQLLEVMSWQFSSYVGRGLNSDQLHMLAEKLTVQSSYSDGHLTWAKFCKEHLPGKSFTFWTWLEAILDLIKKHILPLWIDGYVMGFVSKEKERLLLKDKMPGTFLLRFSESHLGGITFTWVDHSESGEVRFHSVEPYNKGRLSALPFADILRDYKVIMAENIPENPLKYLYPDIPKDKAFGKHYSSQPCEVSRPTERGDKGYVPSVFIPISTIRSDSTEPHSPSDLLPMSPSVYAVLRENLSPTTIETAMKSPYSAE

SEQ ID NO: 15698 - protein, 794 aa, Homo sapiens
MAGWIQAQQLQGDALRQMQVLYGQHFPIEVRHYLAQWIESQPWDAIDLDNPQDRAQATQLLEGLVQELQKKAEHQVGEDGFLLKIKLGHYATQLQKTYDRCPLELVRCIRHILYNEQRLVREANNCSSPAGILVDAMSQKHLQINQTFEELRLVTQDTENELKKLQQTQEYFIIQYQESLRIQAQFAQLAQLSPQERLSRETALQQKQVSLEAWLQREAQTLQQYRVELAEKHQKTLQLLRKQQTIILDDELIQWKRRQQLAGNGGPPEGSLDVLQSWCEKLAEIIWQNRQQIRRAEHLCQQLPIPGPVEEMLAEVNATITDIISALVTSTFIIEKQPPQVLKTQTKFAATVRLLVGGKLNVHMNPPQVKATIISEQQAKSLLKNENTRNECSGEILNNCCVMEYHQATGTLSAHFRNMSLKRIKRADRRGAESVTEEKFTVLFESQFSVGSNELVFQVKTLSLPVVVIVHGSQDHNATATVLWDNAFAEPGRVPFAVPDKVLWPQLCEALNMKFKAEVQSNRGLTKENLVFLAQKLFNNSSSHLEDYSGLSVSWSQFNRENLPGWNYTFWQWFDGVMEVLKKHHKPHWNDGAILGFVNKQQAHDLLINKPDGTFLLRFSDSEIGGITIAWKFDSPERNLWNLKPFTTRDFSIRSLADRLGDLSYLIYVFPDRPKDEVFSKYYTPVLAKAVDGYVKPQIKQVVPEFVNASADAGGSSATYMDQAPSPAVCPQAPYNMYPQNPDHVLDQDGEFDLDETMDVARHVEELLRRPMDSLDSRLSPPAGLFTSARGSLS

SEQ ID NO: 15699 - protein, 794 aa, Homo sapiens; identical to SEQ ID NO: 15698

SEQ ID NO: 15700 - protein, 787 aa, Homo sapiens
MAVWIQAQQLQGEALHQMQALYGQHFPIEVRHYLSQWIESQAWDSVDLDNPQENIKATQLLEGLVQELQKKAEHQVGEDGFLLKIKLGHYATQLQNTYDRCPMELVRCIRHILYNEQRLVREANNGSSPAGSLADAMSQKHLQINQTFEELRLVTQDTENELKKLQQTQEYFIIQYQESLRIQAQFGPLAQLSPQERLSRETALQQKQVSLEAWLQREAQTLQQYRVELAEKHQKTLQLLRKQQTIILDDELIQWKRRQQLAGNGGPPEGSLDVLQSWCEKLAEIIWQNRQQIRRAEHLCQQLPIPGPVEEMLAEVNATITDIISALVTSTFIIEKQPPQVLKTQTKFAATVRLLVGGKLNVHMNPPQVKATIISEQQAKSLLKNENTRNDYSGEILNNCCVMEYHQATGTLSAHFRNMSLKRIKRSDRRGAESVTEEKFTILFESQFSVGGNELVFQVKTLSLPVVVIVHGSQDNNATATVLWDNAFAEPGRVPFAVPDKVLWPQLCEALNMKFKAEVQSNRGLTKENLVFLAQKLFNNSSSHLEDYSGLSVSWSQFNRENLPGRNYTFWQWFDGVMEVLKKHLKPHWNDGAILGFVNKQQAHDLLINKPDGTFLLRFSDSEIGGITIAWKFDSQERMFWNLMPFTTRDFSIRSLADRLGDLNYLIYVFPDRPKDEVYSKYYTPVPCESATAKAVDGYVKPQIKQVVPEFVNASADAGGGSATYMDQAPSPAVCPQAHYNMYPQNPDSVLDTDGDFDLEDTMDVARRVEELLGRPMDSQWIPHAQS

SEQ ID NO: 15701 - protein, 847 aa, Homo sapiens
MSLWGLVSKMPPEKVQRLYVDFPQHLRHLLGDWLESQPWEFLVGSDAFCCNLASALLSDTVQHLQASVGEQGEGSTILQHISTLESIYQRDPLKLVATFRQILQGEKKAVMEQFRHLPMPFHWKQEELKFKTGLRRLQHRVGEIHLLREALQKGAEAGQVSLHSLIETPANGTGPSEALAMLLQETTGELEAAKALVLKRIQIWKRQQQLAGNGAPFEESLAPLQERCESLVDIYSQLQQEVGAAGGELEPKTRASLTGRLDEVLRTLVTSCFLVEKQPPQVLKTQTKFQAGVRFLLGLRFLGAPAKPPLVRADMVTEKQARELSVPQGPGAGAESTGEIINNTVPLENSIPGNCCSALFKNLLLKKIKRCERKGTESVTEEKCAVLFSASFTLGPGKLPIQLQALSLPLVVIVHGNQDNNAKATILWDNAFSEMDRVPFVVAERVPWEKMCETLNLKFMAEVGTNRGLLPEHFLFLAQKIFNDNSLSMEAFQHRSVSWSQFNKEILLGRGFTFWQWFDGVLDLTKRCLRSYWSDRLIIGFISKQYVTSLLLNEPDGTFLLRFSDSEIGGITIAHVIRGQDGSPQIENIQPFSAKDLSIRSLGDRIRDLAQLKNLYPKKPKDEAFRSHYKPEQMGKDGRGYVPATIKMTVERDQPLPTPELQMPTMVPSYDLGMAPDSSMSMQLGPDMVPQVYPPHSHSIPPYQGLSPEESVNVLSAFQEPHLQMPPSLGQMSLPFDQPHPQGLLPCQPQEHAVSSPDPLLCSDVTMVEDSCLSQPVTAFPQGTWIGEDIFPPLLPPTEQDLTKLLLEGQGESGGGSLGAQPLLQPSHYGQSGISMSHMDLRANPSW

SEQ ID NO: 15702 - protein, 443 aa, Homo sapiens
MDRLGPFSNDPSDKPPCRGCSSYLMEPYIKCAECGPPPFFLCLQCFTRGFEYKKHQSDHTYEIMTSDFPVLDPSWTAQEEMALLEAVMDCGFGNWQDVANQMCTKTKEECEKHYMKHFINNPLFASTLLNLKQAEEAKTADTAIPFHSTDDPPRPTFDSLLSRDMAGYMPARADFIEEFDNYAEWDLRDIDFVEDDSDILHALKMAVVDIYHSRLKERQRRKKIIRDHGLINLRKFQLMERRYPKEVQDLYETMRRFARIVGPVEHDKFIESHALEFELRREIKRLQEYRTAGITNFCSARTYDHLKKTREEERLKRTMLSEVLQYIQDSSACQQWLRRQADIDSGLSPSIPMASNSGRRSAPPLNLTGLPGTEKLNEKEKELCQMVRLVPGAYLEYKSALLNECNKQGGLRLAQARALIKIDVNKTRKIYDFLIREGYITKG

SEQ ID NO: 15703 - protein, 420 aa, Homo sapiens
MAELGKKYCVYCLAEVSPLRFRCTECQDIELCPECFSAGAEIGHHRRYHGYQLVDGGRFTLWGPEAEGGWTSREEQLLLDAIEQFGFGNWEDMAAHVGASRTPQEVMEHYVSMYIHGNLGKACIPDTIPNRVTDHTCPSGGPLSPSLTTPLPPLDISVAEQQQLGYMPLRDDYEIEYDQDAETLISGLSVNYDDDDVEIELKRAHVDMYVRKLKERQRRKNIARDYNLVPAFLGKDKKEKEKALKRKITKEEKELRLKLRPLYQFMSCKEFDDLFENMHKEKMLRAKIRELQRYRRNGITKMEESAEYEAARHKREKRKENKNLAGSKRGKEDGKDSEFAAIENLPGFELLSDREKVLCSSLNLSPARYVTVKTIIIKDHLQKRQGIPSKSRLPSYLDKVLKKRILNFLTESGWISRDAS

SEQ ID NO: 15704 - protein, 1872 aa, Homo sapiens
MGPGCDLLLRTAATITAAAIMSDTDSDEDSAGGGPFSLAGFLFGNINGAGQLEGESVLDDECKKHLAGLGALGLGSLITELTANEELTGTDGALVNDEGWVRSTEDAVDYSDINEVAEDESRRYQQTMGSLQPLCHSDYDEDDYDADCEDIDCKLMPPPPPPPGPMKKDKDQDSITGEKVDFSSSSDSESEMGPQEATQAESEDGKLTLPLAGIMQHDATKLLPSVTELFPEFRPGKVLRFLRLFGPGKNVPSVWRSARRKRKKKHRELIQEEQIQEVECSVESEVSQKSLWNYDYAPPPPPEQCLSDDEITMMAPVESKFSQSTGDIDKVTDTKPRVAEWRYGPARLWYDMLGVPEDGSGFDYGFKLRKTEHEPVIKSRMIEEFRKLEENNGTDLLADENFLMVTQLHWEDDIIWDGEDVKHKGTKPQRASLAGWLPSSMTRNAMAYNVQQGFAATLDDDKPWYSIFPIDNEDLVYGRWEDNIIWDAQAMPRLLEPPVLTLDPNDENLILEIPDEKEEATSNSPSKESKKESSLKKSRILLGKTGVIKEEPQQNMSQPEVKDPWNLSNDEYYYPKQQGLRGTFGGNIIQHSIPAVELRQPFFPTHMGPIKLRQFHRPPLKKYSFGALSQPGPHSVQPLLKHIKKKAKMREQERQASGGGEMFFMRTPQDLTGKDGDLILAEYSEENGPLMMQVGMATKIKNYYKRKPGKDPGAPDCKYGETVYCHTSPFLGSLHPGQLLQAFENNLFRAPIYLHKMPETDFLIIRTRQGYYIRELVDIFVVGQQCPLFEVPGPNSKRANTHIRDFLQVFIYRLFWKSKDRPRRIRMEDIKKAFPSHSESSIRKRLKLCADFKRTGMDSNWWVLKSDFRLPTEEEIRAMVSPEQCCAYYSMIAAEQRLKDAGYGEKSFFAPEEENEEDFQMKIDDEVRTAPWNTTRAFIAAMKGKCLLEVTGVADPTGCGEGFSYVKIPNKPTQQKDDKEPQPVKKTVTGTDADLRRLSLKNAKQLLRKFGVPEEEIKKLSRWEVIDVVRTMSTEQARSGEGPMSKFARGSRFSVAEHQERYKEECQRIFDLQNKVLSSTEVLSTDTDSSSAEDSDFEEMGKNIENMLQNKKTSSQLSREREEQERKELQRMLLAAGSAASGNNHRDDDTASVTSLNSSATGRCLKIYRTFRDEEGKEYVRCETVRKPAVIDAYVRIRTTKDEEFIRKFALFDEQHREEMRKERRRIQEQLRRLKRNQEKEKLKGPPEKKPKKMKERPDLKLKCGACGAIGHMRTNKFCPLYYQTNAPPSNPVAMTEEQEEELEKTVIHNDNEELIKVEGTKIVLGKQLIESADEVRRKSLVLKFPKQQLPPKKKRRVGTTVHCDYLNRPHKSIHRRRTDPMVTLSSILESIINDMRDLPNTYPFHTPVNAKVVKDYYKIITRPMDLQTLRENVRKRLYPSREEFREHLELIVKNSATYNGPKHSLTQISQSMLDLCDEKLKEKEDKLARLEKAINPLLDDDDQVAFSFILDNIVTQKMMAVPDSWPFHHPVNKKFVPDYYKVIVNPMDLETIRKNISKHKYQSRESFLDDVNLILANSVKYNGPESQYTKTAQEIVNVCYQTLTEYDEHLTQLEKDICTAKEAALEEAELESLDPMTPGPYTPQPPDLYDTNTSLSMSRDASVFQDESNMSVLDIPSATPEKQVTQEGEDGDGDLADEEEGTVQQPQASVLYEDLLMSEGEDDEEDAGSDEEGDNPFSAIQLSESGSDSDVGSGGIRPKQPRMLQENTRMDMENEESMMSYEGDGGEASHGLEDSNISYGSYEEPDPKSNTQDTSFSSIGGYEVSEEEEDEEEEEQRSGPSVLSQVHLSEDEEDSEDFHSIAGDSDLDSDE

SEQ ID NO: 15705 - protein, 331 aa, Homo sapiens
MTERPPSEAARSDPQLEGRDAAEASMAPPHLVLLNGVAKETSRAAAAEPPVIELGARGGPGGGPAGGGGAARDLKGRDAATAEARHRVPTTELCRPPGPAPAPAPASVTAELPGDGRMVQLSPPALAAPAAPGRALLYSLSQPLASLGSGFFGEPDAFPMFTTNNRVKRRPSPYEMEITDGPHTKVVRRIFTNSRERWRQQNVNGAFAELRKLIPTHPPDKKLSKNEILRLAMKYINFLAKLLNDQEEEGTQRAKTGKDPVVGAGGGGGGGGGGAPPDDLLQDVLSPNSSCGSSLDGAASPDSYTEEPAPKHTARSLHPAMLPAADGAGPR

SEQ ID NO: 15706 - protein, 108 aa, Homo sapiens
MTRKIFTNTRERWRQQNVNSAFAKLRKLIPTHPPDKKLSKNETLRLAMRYINFLVKVLGEQSLQQTGVAAQGNILGLFPQGPHLPGLEDRTLLENYQVPSPGPSHHIP

SEQ ID NO: 15707 - protein, 789 aa, Homo sapiens
MTSFQEVPLQTSNFAHVIFQNVAKSYLPNAHLECHYTLTPYIHPHPKDWVGIFKVGWSTARDYYTFLWSPMPEHYVEGSTVNCVLAFQGYYLPNDDGEFYQFCYVTHKGEIRGASTPFQFRASSPVEELLTMEDEGNSDMLVVTTKAGLLELKIEKTMKEKEELLKLIAVLEKETAQLREQVGRMERELNHEKERCDQLQAEQKGLTEVTQSLKMENEEFKKRFSDATSKAHQLEEDIVSVTHKAIEKETELDSLKDKLKKAQHEREQLECQLKTEKDEKELYKVHLKNTEIENTKLMSEVQTLKNLDGNKESVITHFKEEIGRLQLCLAEKENLQRTFLLTTSSKEDTCFLKEQLRKAEEQVQATRQEVVFLAKELSDAVNVRDRTMADLHTARLENEKVKKQLADAVAELKLNAMKKDQDKTDTLEHELRREVEDLKLRLQMAADHYKEKFKECQRLQKQINKLSDQSANNNNVFTKKTGNQQKVNDASVNTDPATSASTVDVKPSPSAAEADFDIVTKGQVCEMTKEIADKTEKYNKCKQLLQDEKAKCNKYADELAKMELKWKEQVKIAENVKLELAEVQDNYKELKRSLENPAERKMEGQNSQSPQCFKTCSEQNGYVLTLSNAQPVLQYGNPYASQETRDGADGAFYPDEIQRPPVRVPSWGLEDNVVCSQPARNFSRPDGLEDSEDSKEDENVPTAPDPPSQHLRGHGTGFCFDSSFDVHKKCPLCELMFPPNYDQSKFEEHVESHWKVCPMCSEQFPPDYDQQVFERHVQTHFDQNVLNFD

SEQ ID NO: 15708 - protein, 124 aa, Homo sapiens
MSYIPGQPVTAVVQRVEIHKLRQGENLILGFSIGGGIDQDPSQNPFSEDKTDKGIYVTRVSEGGPAEIAGLQIGDKIMQVNGWDMTMVTHDQARKRLTKRSEEVVRLLVTRQSLQKAVQQSMLS

SEQ ID NO: 15709 - protein, 535 aa, Homo sapiens
MGIVEPGCGDMLTGTEPMPGSDEGRAPGADPQHRYFYPEPGAQDADERRGGGSLGSPYPGGALVPAPPSRFLGAYAYPPRPQAAGFPGAGESFPPPADAEGYQPGEGYAAPDPRAGLYPGPREDYALPAGLEVSGKLRVALNNHLLWSKFNQHQTEMIITKQGRRMFPFLSFTVAGLEPTSHYRMFVDVVLVDQHHWRYQSGKWVQCGKAEGSMPGNRLYVHPDSPNTGAHWMRQEVSFGKLKLTNNKGASNNVTQMIVLQSLHKYQPRLHIVEVNDGEPEAACNASNTHIFTFQETQFIAVTAYQNAEITQLKIDNNPFAKGFRENFESMYTSVDTSIPSPPGPNCQFLGGDHYSPLLPNQYPVPSRFYPDLPGQAKDVVPQAYWLGAPRDHSYEAEFRAVSMKPAFLPSAPGPTMSYYRGQEVLAPGAGWPVAPQYPPKMGPASWFRPMRTLPMEPGPGGSEGRGPEDQGPPLVWTEIAPIRPESSDSGLGEGDSKRRRVSPYPSSGDSSSPAGAPSPFDKEAEGQFYNYFPN

SEQ ID NO: 15710 - protein, 339 aa, Homo sapiens
MDQNNSLPPYAQGLASPQGAMTPGIPIFSPMMPYGTGLTPQPIQNTNSLSILEEQQRQQQQQQQQQQQQQQQQQQQQQQQQQQQQQQQQQQQQQQAVAAAAVQQSTSQQATQGTSGQAPQLFHSQTLTTAPLPGTTPLYPSPMTPMTPITPATPASESSGIVPQLQNIVSTVNLGCKLDLKTIALRARNAEYNPKRFAAVIMRIREPRTTALIFSSGKMVCTGAKSEEQSRLAARKYARVVQKLGFPAKFLDFKIQNMVGSCDVKFPIRLEGLVLTHQQFSSYEPELFPGLIYRMIKPRIVLLIFVSGKVVLTGAKVRAEIYEAFENIYPILKGFRKTT

SEQ ID NO: 15711 - protein, 186 aa, Homo sapiens
MDADSDVALDILITNVVCVFRTRCHLNLRKIALEGANVIYKRDVGKVLMKLRKPRITATIWSSGKIICTGATSEEEAKFGARRLARSLQKLGFQVIFTDFKVVNVLAVCNMPFEIRLPEFTKNNRPHASYEPELHPAVCYRIKSLRATLQIFSTGSITVTGPNVKAVATAVEQIYPFVFESRKEIL

SEQ ID NO: 15712 - protein, 375 aa, Homo sapiens
MASAPWPERVPRLLAPRLPSYPPPPPTVGLRSMEQEETYLELYLDQCAAQDGLAPPRSPLFSPVVPYDMYILNASNPDTAFNSNPEVKETSGDFSSVDLSFLPDEVTQENKDQPVISKHETEENSESQSPQSRLPSPSEQDVGLGLNSSSLSNSHSQLHPGDTDSVQPSPEKPNSDSLSLASITPMTPMTPISECCGIVPQLQNIVSTVNLACKLDLKKIALHAKNAEYNPKRFAAVIMRIREPRTTALIFSSGKMVCTGAKSEEQSRLAARKYARVVQKLGFPARFLDFKIQNMVGSCDVRFPIRLEGLVLTHQQFSSYEPELFPGLIYRMVKPRIVLLIFVSGKVVLTGAKERSEIYEAFENIYPILKGFKKA

SEQ ID NO: 15713 - protein, 682 aa, Homo sapiens
MQLEHCLSPSIMLSKKFLNVSSSYPHSGGSELVLHDHPIISTTDNLERSSPLKKITRGMTNQSDTDNFPDSKDSPGDVQRSKLSPVLDGVSELRHSFDGSAADRYLLSQSSQPQSAATAPSAMFPYPGQHGPAHPAFSIGSPSRYMAHHPVITNGAYNSLLSNSSPQGYPTAGYPYPQQYGHSYQGAPFYQFSSTQPGLVPGKAQVYLCNRPLWLKFHRHQTEMIITKQGRRMFPFLSFNISGLDPTAHYNIFVDVILADPNHWRFQGGKWVPCGKADTNVQGNRVYMHPDSPNTGAHWMRQEISFGKLKLTNNKGASNNNGQMVVLQSLHKYQPRLHVVEVNEDGTEDTSQPGRVQTFTFPETQFIAVTAYQNTDITQLKIDHNPFAKGFRDNYDTIYTGCDMDRLTPSPNDSPRSQIVPGARYAMAGSFLQDQFVSNYAKARFHPGAGAGPGPGTDRSVPHTNGLLSPQQAEDPGAPSPQRWFVTPANNRLDFAASAYDTATDFAGNAATLLSYAAAGVKALPLQAAGCTGRPLGYYADPSGWGARSPPQYCGTKSGSVLPCWPNSAAAAARMAGANPYLGEEAEGLAAERSPLPPGAAEDAKPKDLSDSSWIETPSSIKSIDSSDSGIYEQAKRRRISPADTPVSESSSPLKSEVLAQRDCEKNCAKDISGYYGFYSHS

SEQ ID NO: 15714 - protein, 398 aa, Homo sapiens
MHFSTVTRDMEAFTASSLSSLGAAGGFPGAASPGADPYGPREPPPPPPRYDPCAAAAPGAPGPPPPPHAYPFAPAAGAATSAAAEPEGPGASCAAAAKAPVKKNAKVAGVSVQLEMKALWDEFNQLGTEMIVTKAGRRMFPTFQVKLFGMDPMADYMLLMDFVPVDDKRYRYAFHSSSWLVAGKADPATPGRVHYHPDSPAKGAQWMKQIVSFDKLKLTNNLLDDNGHIILNSMHRYQPRFHVVYVDPRKDSEKYAEENFKTFVFEETRFTAVTAYQNHRITQLKIASNPFAKGFRDCDPEDWPRNHRPGALPLMSAFARSRNPVASPTQPSGTEKGGHVLKDKEVKAETSRNTPEREVELLRDAGGCVNLGLPCPAECQPFNTQGLVAGRTAGDRLC

SEQ ID NO: 15715 - protein, 385 aa, Homo sapiens; identical to SEQ ID NO: 13037

SEQ ID NO: 15716 - protein, 602 aa, Homo sapiens
MSERRRSAVALSSRAHAFSVEALIGSNKKRKLRDWEEKGLDLSMEALSPAGPLGDTEDAAAHGLEPHPDSEQSTGSDSEVLTERTSCSFSTHTDLASGAAGPVPAAMSSMEEIQVELQCADLWKRFHDIGTEMIITKAGRRMFPAMRVKITGLDPHQQYYIAMDIVPVDNKRYRYVYHSSKWMVAGNADSPVPPRVYIHPDSLASGDTWMRQVVSFDKLKLTNNELDDQGHIILHSMHKYQPRVHVIRKDFSSDLSPTKPVPVGDGVKTFNFPETVFTTVTAYQNQQITRLKIDRNPFAKGFRDSGRNRTGLEAIMETYAFWRPPVRTLTFEDFTTMQKQQGGSTGTSPTTSSTGTPSPSASSHLLSPSCSPPTFHLAPNTFNVGCRESQLCNLNLSDYPPCARSNMAALQSYPGLSDSGYNRLQSGTTSATQPSETFMPQRTPSLISGIPTPPSLPGNSKMEAYGGQLGSFPTSQFQYVMQAGNAASSSSSPHMFGGSHMQQSSYNAFSLHNPYNLYGYNFPTSPRLAASPEKLSASQSTLLCSSPSNGAFGERQYLPSGMEHSMHMISPSPNNQQATNTCDGRQYGAVPGSSSQMSVHMV

SEQ ID NO: 15717 - protein, 607 aa, Homo sapiens
MAEKRRGSPCSMLSLKAHAFSVEALIGAEKQQQLQKKRRKLGAEEAAGAVDDGGCSRGGGAGEKGSSEGDEGAALPPPAGATSGPARSGADLERGAAGGCEDGFQQGASPLASPGGSPKGSPARSLARPGTPLPSPQAPRVDLQGAELWKRFHEIGTEMIITKAGRRMFPAMRVKISGLDPHQQYYIAMDIVPVDNKRYRYVYHSSKWMVAGNADSPVPPRVYIHPDSPASGETWMRQVISFDKLKLTNNELDDQGHIILHSMHKYQPRVHVIRKDCGDDLSPIKPVPSGEGVKAFSFPETVFTTVTAYQNQQITRLKIDRNPFAKGFRDSGRNRMGLEALVESYAFWRPSLRTLTFEDIPGIPKQGNASSSTLLQGTGNGVPATHPHLLSGSSCSSPAFHLGPNTSQLCSLAPADYSACARSGLTLNRYSTSLAETYNRLTNQAGETFAPPRTPSYVGVSSSTSVNMSMGGTDGDTFSCPQTSLSMQISGMSPQLQYIMPSPSSNAFATNQTHQGSYNTFRLHSPCALYGYNFSTSPKLAASPEKIVSSQGSFLGSSPSGTMTDRQMLPPVEGVHLLSSGGQQSFFDSRTLGSLTLSSSQVSAHMV

SEQ ID NO: 15718 - protein, 448 aa, Homo sapiens
MAMSELGTRKPSDGTVSHLLNVVESELQAGREKGDPTEKQLQIILEDAPLWQRFKEVTNEMIVTKNGRRMFPVLKISVTGLDPNAMYSLLLDFVPTDSHRWKYVNGEWVPAGKPEVSSHSCVYIHPDSPNFGAHWMKAPISFSKVKLTNKLNGGGQIMLNSLHKYEPQVHIVRVGSAHRMVTNCSFPETQFIAVTAYQNEEITALKIKYNPFAKAFLDAKERNHLRDVPEAISESQHVTYSHLGGWIFSNPDGVCTAGNSNYQYAAPLPLPAPHTHHGCEHYSGLRGHRQAPYPSAYMHRNHSPSVNLIESSSNNLQVFSGPDSWTSLSSTPHASILSVPHTNGPINPGPSPYPCLWTISNGAGGPSGPGPEVHASTPGAFLLGNPAVTSPPSVLSTQAPTSAGVEVLGEPSLTSIAVSTWTAVASHPFAGWGGPGAGGHHSPSSLDG

SEQ ID NO: 15719 - protein, 712 aa, Homo sapiens
MREPALAASAMAYHPFHAPRPADFPMSAFLAAAQPSFFPALALPPGALAKPLPDPGLAGAAAAAAAAAAAAEAGLHVSALGPHPPAAHLRSLKSLEPEDEVEDDPKVTLEAKELWDQFHKLGTEMVITKSGRRMFPPFKVRVSGLDKKAKYILLMDIVAADDCRYKFHNSRWMVAGKADPEMPKRMYIHPDSPATGEQWMAKPVAFHKLKLTNNISDKHGFTILNSMHKYQPRFHIVRANDILKLPYSTFRTYVFPETDFIAVTAYQNDKITQLKIDNNPFAKGFRDTGNGRREKRKQLTLPSLRLYEEHCKPERDGAESDASSCDPPPAREPPTSPGAAPSPLRLHRARAEEKSCAADSDPEPERLSEERAGAPLGRSPAPDSASPTRLTEPERARERRSPERGKEPAESGGDGPFGLRSLEKERAEARRKDEGRKEAAEGKEQGLAPLVVQTDSASPLGAGHLPGLAFSSHLHGQQFFGPLGAGQPLFLHPGQFTMGPGAFSAMGMGHLLASVAGGGNGGGGGPGTAAGLDAGGLGPAASAASTAAPFPFHLSQHMLASQGIPMPTFGGLFPYPYTYMAAAAAAASALPATSAAAAAAAAAGSLSRSPFLGSARPRLRFSPYQIPVTIPPSTSLLTTGLASEGSKAAGGNSREPSPLPELALRKVGAPSRGALSPSGSAKEAANELQSIQRLVSGLESQRALSPGRESPK

SEQ ID NO: 15720 - protein, 447 aa, Homo sapiens
MEFTASPKPQLSSRANAFSIAALMSSGGSKEKEATENTIKPLEQFVEKSSCAQPLGELTSLDAHGEFGGGSGSSPSSSSLCTEPLIPTTPIIPSEEMAKIACSLETKELWDKFHELGTEMIITKSGRRMFPTIRVSFSGVDPEAKYIVLMDIVPVDNKRYRYAYHRSSWLVAGKADPPLPARLYVHPDSPFTGEQLLKQMVSFEKVKLTNNELDQHGHIILNSMHKYQPRVHIIKKKDHTASLLNLKSEEFRTFIFPETVFTAVTAYQNQLITKLKIDSNPFAKGFRDSSRLTDIERESVESLIQKHSYARSPIRTYGGEEDVLGDESQTTPNRGSAFTTSDNLSLSSWVSSSSSFPGFQHPQSLTALGTSTASIATPIPHPIQGSLPPYSRLGMPLTPSAIASSMQGSGPTFPSFHMPRYHHYFQQGPYAAIQGLRHSSAVMTPFV

SEQ ID NO: 15721 - protein, 535 aa, Homo sapiens; identical to SEQ ID NO: 15709

SEQ ID NO: 15722 - protein, 520 aa, Homo sapiens
MALSSRARAFSVEALVGRPSKRKLQDPIQAEQPELREKKGGEEEEERRSSAAGKSEPLEKQPKTEPSTSASSGCGSDSGYGNSSESLEEKDIQMELQGSELWKRFHDIGTEMIITKAGRRMFPSVRVKVKGLDPGKQYHVAIDVVPVDSKRYRYVYHSSQWMVAGNTDHLCIIPRFYVHPDSPCSGETWMRQIISFDRMKLTNNEMDDKGHIILQSMHKYKPRVHVIEQGSSVDLSQIQSLPTEGVKTFSFKETEFTTVTAYQNQQITKLKIERNPFAKGFRDTGRNRGVLDGLLETYPWRPSFTLDFKTFGADTQSGSSGSSPVTSSGGAPSPLNSLLSPLCFSPMFHLPTSSLGMPCPEAYLPNVNLPLCYKICPTNFWQQQPLVLPAPERLASSNSSQSLAPLMMEVPMLSSLGVTNSKSGSSEDSSDQYLQAPNSTNQMLYGLQSPGNIFLPNSITPEALSCSFHPSYDFYRYNFSMPSRLISGSNHLKVNDDSQVSFGEGKCNHVHWYPAINHYL

SEQ ID NO: 15723 - protein, 743 aa, Homo sapiens
MSLSMRDPVIPGTSMAYHPFLPHRAPDFAMSAVLGHQPPFFPALTLPPNGAAALSLPGALAKPIMDQLVGAAETGIPFSSLGPQAHLRPLKTMEPEEEVEDDPKVHLEAKELWDQFHKRGTEMVITKSGRRMFPPFKVRCSGLDKKAKYILLMDIIAADDCRYKFHNSRWMVAGKADPEMPKRMYIHPDSPATGEQWMSKVVTFHKLKLTNNISDKHGFTLAFPSDHATWQGNYSFGTQTILNSMHKYQPRFHIVRANDILKLPYSTFRTYLFPETEFIAVTAYQNDKITQLKIDNNPFAKGFRDTGNGRREKRKQLTLQSMRVFDERHKKENGTSDESSSEQAAFNCFAQASSPAASTVGTSNLKDLCPSEGESDAEAESKEEHGPEACDAAKISTTTSEEPCRDKGSPAVKAHLFAAERPRDSGRLDKASPDSRHSPATISSSTRGLGAEERRSPVREGTAPAKVEEARALPGKEAFAPLTVQTDAAAAHLAQGPLPGLGFAPGLAGQQFFNGHPLFLHPSQFAMGGAFSSMAAAGMGPLLATVSGASTGVSGLDSTAMASAAAAQGLSGASAATLPFHLQQHVLASQGLAMSPFGSLFPYPYTYMAAAAAASSAAASSSVHRHPFLNLNTMRPRLRYSPYSIPVPVPDGSSLLTTALPSMAAAAGPLDGKVAALAASPASVAVDSGSELNSRSSTLSSSSMSLSPKLCAEKEAATSELQSIQRLVSGLEAKPDRSRSASP

SEQ ID NO: 15724 - protein, 545 aa, Homo sapiens
MLQDKGLSESEEAFRAPGPALGEASAANAPEPALAAPGLSGAALGSPPGPGADVVAAAAAEQTIENIKVGLHEKELWKKFHEAGTEMIITKAGRRMFPSYKVKVTGMNPKTKYILLIDIVPADDHRYKFCDNKWMVAGKAEPAMPGRLYVHPDSPATGAHWMRQLVSFQKLKLTNNHLDPFGHIILNSMHKYQPRLHIVKADENNAFGSKNTAFCTHVFPETSFISVTSYQNHKITQLKIENNPFAKGFRGSDDSDLRVARLQSKEYPVISKSIMRQRLISPQLSATPDVGPLLGTHQALQHYQHENGAHSQLAEPQDLPLSTFPTQRDSSLFYHCLKRRDGTRHLDLPCKRSYLEAPSSVGEDHYFRSPPPYDQQMLSPSYCSEVTPREACMYSGSGPEIAGVSGVDDLPPPPLSCNMWTSVSPYTSYSVQTMETVPYQPFPTHFTATTMMPRLPTLSAQSSQPPGNAHFSVYNQLSQSQVRERGPSASFPRERGLPQGCERKPPSPHLNAANEFLYSQTFSLSRESSLQYHSGMGTVENWTDG

SEQ ID NO: 15725 - protein, 518 aa, Homo sapiens
MADADEGFGLAHTPLEPDAKDLPCDSKPESALGAPSKSPSSPQAAFTQQGMEGIKVFLHERELWLKFHEVGTEMIITKAGRRMFPSYKVKVTGLNPKTKYILLMDIVPADDHRYKFADNKWSVTGKAEPAMPGRLYVHPDSPATGAHWMRQLVSFQKLKLTNNHLDPFGHIILNSMHKYQPRLHIVKADENNGFGSKNTAFCTHVFPETAFIAVTSYQNHKITQLKIENNPFAKGFRGSDDMELHRMSRMQSKEYPVVPRSTVRQKVASNHSPFSSESRALSTSSNLGSQYQCENGVSGPSQDLLPPPNPYPLPQEHSQIYHCTKRKEEECSTTDHPYKKPYMETSPSEEDSFYRSSYPQQQGLGASYRTESAQRQACMYASSAPPSEPVPSLEDISCNTWPSMPSYSSCTVTTVQPMDRLPYQHFSAHFTSGPLVPRLAGMANHGSPQLGEGMFQHQTSVAHQPVVRQCGPQTGLQSPGTLQPPEFLYSHGVPRTLSPHQYHSVHGVGMVPEWSDNS

SEQ ID NO: 15726 - protein, 436 aa, Homo sapiens
MYHPRELYPSLGAGYRLGPAQPGADSSFPPALAEGYRYPELDTPKLDCFLSGMEAAPRTLAAHPPLPLLPPAMGTEPAPSAPEALHSLPGVSLSLENRELWKEFSSVGTEMIITKAGRRMFPACRVSVTGLDPEARYLFLLDVIPVDGARYRWQGRRWEPSGKAEPRLPDRVYIHPDSPATGAHWMRQPVSFHRVKLTNSTLDPHGHLILHSMHKYQPRIHLVRAAQLCSQHWGGMASFRFPETTFISVTAYQNPQITQLKIAANPFAKGFRENGRNCKRERDARVKRKLRGPEPAATEAYGSGDTPGGPCDSTLGGDIRESDPEQAPAPGEATAAPAPLCGGPSAEAYLLHPAAFHGAPSHLPTRSPSFPEAPDSGRSAPYSAAFLELPHGSGGSGYPAAPPAVPFAPHFLQGGPFPLPYTAPGGYLDVGSKPMY

SEQ ID NO: 15727 - protein, 682 aa, Homo sapiens; identical to SEQ ID NO: 13041

SEQ ID NO: 15728 - protein, 199 aa, Homo sapiens
MAFALLRPVGAHVLYPDVRLLSEDEENRSESDASDQSFGCCEGPEAARRGPGPGGGRRAGGGGGAGPVVVVRQRQAANARERDRTQSVNTAFTALRTLIPTEPVDRKLSKIETVRLASSYIAHLANVLLLGDSADDGQPCFRAAGSAKGAVPAAADGGRQPRSICTFCLSNQRKGGGRRDLGGSCLKVRGVAPLRGPRR

SEQ ID NO: 15729 - protein, 345 aa, Homo sapiens
MLPCFQLLRIGGGRGGDLYTFHPPAGAGCTYRLGHRADLCDVALRPQQEPGLISGIHAELHAEPRGDDWRVSLEDHSSQGTLVNNVRLPRGHRLELSDGDLLTFGPEGPPGTSPSEFYFMFQQVRVKPQDFAAITIPRSRGEARVGAGFRPMLPSQGAPQRPLSTFSPAPKATLILNSIGSLSKLRPQPLTFSPSWGGPKSLPVPAPPGEMGTTPSAPPQRNRRKSVHRVLAELDDESEPPENPPPVLMEPRKKLRVDKAPLTPTGNRRGRPRKYPVSAPMAPPAVGGGEPCAAPCCCLPQEETVAWVQCDGCDVWFHVACVGCSIQAAREADFRCPGCRAGIQT

SEQ ID NO: 15730 - protein, 1960 aa, Homo sapiens [sequence omitted]

SEQ ID NO: 15731 - protein, 179 aa, Homo sapiens
MSTGSLSDVEDLQEVEMLECDGLKMDSNKEFVTSNESTEESSNCENGSPQKGRGGLGKRRKAPTKKSPLSGVSQEGKQVQRNAANARERARMRVLSKAFSRLKTTLPWVPPDTKLSKLDTLRLASSYIAHLRQILANDKYENGYIHPVNLTWPFMVAGKPESDLKEVVTASRLCGTTAS

SEQ ID NO: 15732 - protein, 214 aa, Homo sapiens
MSQRKARGPPAMPGVGHSQTQAKARLLPGADRKRSRLSRTRQDPWEERSWSNQRWSRATPGPRGTRAGGLALGRSEASPENAARERSRVRTLRQAFLALQAALPAVPPDTKLSKLDVLVLAASYIAHLTRTLGHELPGPAWPPFLRGLRYLHPLKKWPMRSRLYAGGLGYSDLDSTTASTPSQRTRDAEVGSQVPGEADALLSTTPLSPALGDK

SEQ ID NO: 15733 - protein, 167 aa, Homo sapiens
MDRGRPAGSPLSASAEPAPLAAAIRDSRPGRTGPGPAGPGGGSRSGSGRPAAANAARERSRVQTLRHAFLELQRTLPSVPPDTKLSKLDVLLLATTYIAHLTRSLQDDAEAPADAGLGALRGDGYLHPVKKWPMRSRLYIGATGQFLKHSVSGEKTNHDNTPTDSQP

SEQ ID NO: 15734 - protein, 676 aa, Homo sapiens
MSRRALRRLRGEQRGQEPLGPGALHFDLRDDDDAEEEGPKRELGVRRPGGAGKEGVRVNNRFELINIDDLEDDPVVNGERSGCALTDAVAPGNKGRGQRGNTESKTDGDDTETVPSEQSHASGKLRKKKKKQKNKKSSTGEASENGLEDIDRILERIEDSTGLNRPGPAPLSSRKHVLYVEHRHLNPDTELKRYFGARAILGEQRPRQRQRVYPKCTWLTTPKSTWPRYSKPGLSMRLLESKKGLSFFAFEHSEEYQQAQHKFLVAVESMEPNNIVVLLQTSPYHVDSLLQLSDACRFQEDQEMARDLVERALYSMECAFHPLFSLTSGACRLDYRRPENRSFYLALYKQMSFLEKRGCPRTALEYCKLILSLEPDEDPLCMLLLIDHLALRARNYEYLIRLFQEWEAHRNLSQLPNFAFSVPLAYFLLSQQTDLPECEQSSARQKASLLIQQALTMFPGVLLPLLESCSVRPDASVSSHRFFGPNAEISQPPALSQLVNLYLGRSHFLWKEPATMSWLEENVHEVLQAVDAGDPAVEACENRRKVLYQRAPRNIHRHVILSEIKEAVAALPPDVTTQSVMGFDPLPPSDTIYSYVRPERLSPISHGNTIALFFRSLLPNYTMEGERPEEGVAGGLNRNQGLNRLMLAVRDMMANFHLNDLEAPHEDDAEGEGEWD

SEQ ID NO: 15735 - protein, 654 aa, Homo sapiens
MNQPQRMAPVGTDKELSDLLDFSMMFPLPVTNGKGRPASLAGAQFGGSGLEDRPSSGSWGSGDQSSSSFDPSRTFSEGTHFTESHSSLSSSTFLGPGLGGKSGERGAYASFGRDAGVGGLTQAGFLSGELALNSPGPLSPSGMKGTSQYYPSYSGSSRRRAADGSLDTQPKKVRKVPPGLPSSVYPPSSGEDYGRDATAYPSAKTPSSTYPAPFYVADGSLHPSAELWSPPGQAGFGPMLGGGSSPLPLPPGSGPVGSSGSSSTFGGLHQHERMGYQLHGAEVNGGLPSASSFSSAPGATYGGVSSHTPPVSGADSLLGSRGTTAGSSGDALGKALASIYSPDHSSNNFSSSPSTPVGSPQGLAGTSQWPRAGAPGALSPSYDGGLHGLQSKIEDHLDEAIHVLRSHAVGTAGDMHTLLPGHGALASGFTGPMSLGGRHAGLVGGSHPEDGLAGSTSLMHNHAALPSQPGTLPDLSRPPDSYSGLGRAGATAAASEIKREEKEDEENTSAADHSEEEKKELKAPRARTSPDEDEDDLLPPEQKAEREKERRVANNARERLRVRDINEAFKELGRMCQLHLNSEKPQTKLLILHQAVSVILNLEQQVRERNLNPKAACLKRREEEKVSGVVGDPQMVLSAPHPGLSEAHNPAGHM

SEQ ID NO: 15736 - protein, 667 aa, Homo sapiens
MHHQQRMAALGTDKELSDLLDFSAMFSPPVSSGKNGPTSLASGHFTGSNVEDRSSSGSWGNGGHPSPSRNYGDGTPYDHMTSRDLGSHDNLSPPFVNSRIQSKTERGSYSSYGRESNLQGCHQQSLLGGDMDMGNPGTLSPTKPGSQYYQYSSNNPRRRPLHSSAMEVQTKKVRKVPPGLPSSVYAPSASTADYNRDSPGYPSSKPATSTFPSSFFMQDGHHSSDPWSSSSGMNQPGYAGMLGNSSHIPQSSSYCSLHPHERLSYPSHSSADINSSLPPMSTFHRSGTNHYSTSSCTPPANGTDSIMANRGSGAAGSSQTGDALGKALASIYSPDHTNNSFSSNPSTPVGSPPSLSAGTAVWSRNGGQASSSPNYEGPLHSLQSRIEDRLERLDDAIHVLRNHAVGPSTAMPGGHGDMHGIIGPSHNGAMGGLGSGYGTGLLSANRHSLMVGTHREDGVALRGSHSLLPNQVPVPQLPVQSATSPDLNPPQDPYRGMPPGLQGQSVSSGSSEIKSDDEGDENLQDTKSSEDKKLDDDKKDIKSITSNNDDEDLTPEQKAEREKERRMANNARERLRVRDINEAFKELGRMVQLHLKSDKPQTKLLILHQAVAVILSLEQQVRERNLNPKAACLKRREEEKVSSEPPPLSLAGPHPGMGDASNHMGQM

SEQ ID NO: 15737 - protein, 384 aa, Homo sapiens
MPQLDSGGGGAGGGDDLGAPDELLAFQDEGEEQDDKSRDSAAGPERDLAELKSSLVNESEGAAGGAGIPGVPGAGAGARGEAEALGREHAAQRLFPDKLPEPLEDGLKAPECTSGMYKETVYSAFNLLMHYPPPSGAGQHPQPQPPLHKANQPPHGVPQLSLYEHFNSPHPTPAPADISQKQVHRPLQTPDLSGFYSLTSGSMGQLPHTVSWFTHPSLMLGSGVPGHPAAIPHPAIVPPSGKQELQPFDRNLKTQAESKAEKEAKKPTIKKPLNAFMLYMKEMRAKVIAECTLKESAAINQILGRRWHALSREEQAKYYELARKERQLHMQLYPGWSARDNYGKKKRRSREKHQESTTETNWPRELKDGNGQESLSMSSSSSPA

SEQ ID NO: 15738 - protein, 588 aa, Homo sapiens
MPQLGGGGGGGGGGSGGGGGSSAGAAGGGDDLGANDELIPFQDEGGEEQEPSSDSASAQRDLDEVKSSLVNESENQSSSSDSEAERRPQPVRDTFQKPRDYFAEVRRPQDSAFFKGPPYPGYPFLMIPDLSSPYLSNGPLSPGGARTYLQMKWPLLDVPSSATVKDTRSPSPAHLSNKVPVVQHPHHMHPLTPLITYSNDHFSPGSPPTHLSPEIDPKTGIPRPPHPSELSPYYPLSPGAVGQIPHPLGWLVPQQGQPMYSLPPGGFRHPYPALAMNASMSSLVSSRFSPHMVAPAHPGLPTSGIPHPAIVSPIVKQEPAPPSLSPAVSVKSPVTVKKEEEKKPHVKKPLNAFMLYMKEMRAKVVAECTLKESAAINQILGRKWHNLSREEQAKYYELARKERQLHSQLYPTWSARDNYGKKKKRKREKQLSQTQSQQQVQEAEGALASKSKKPCVQYLPPEKPCDSPASSHGSMLDSPATPSAALASPAAPAATHSEQAQPLSLTTKPETRAQLALHSAAFLSAKAAASSSGQMGSQPPLLSRPLPLGSMPTALLASPPSFPATLHAHQALPVLQAQPLSLVTKSAH

SEQ ID NO: 15739 - protein, 619 aa, Homo sapiens
MPQLNGGGGDDLGANDELISFKDEGEQEEKSSENSSAERDLADVKSSLVNESETNQNSSSDSEAERRPPPRSESFRDKSRESLEEAAKRQDGGLFKGPPYPGYPFIMIPDLTSPYLPNGSLSPTARTLHFQSGSTHYSAYKTIEHQIAVQYLQMKWPLLDVQAGSLQSRQALKDARSPSPAHIVSNKVPVVQHPHHVHPLTPLITYSNEHFTPGNPPPHLPADVDPKTGIPRPPHPPDISPYYPLSPGTVGQIPHPLGWLVPQQGQPVYPITTGGFRHPYPTALTVNASMSRFPPHMVPPHHTLHTTGIPHPAIVTPTVKQESSQSDVGSLHSSKHQDSKKEEEKKKPHIKKPLNAFMLYMKEMRAKVVAECTLKESAAINQILGRRWHALSREEQAKYYELARKERQLHMQLYPGWSARDNYGKKKKRKRDKQPGETNEHSECFLNPCLSLPPITDLSAPKKCRARFGLDQQNNWCGPCRRKKKCVRYIQGEGSCLSPPSSDGSLLDSPPPSPNLLGSPPRDAKSQTEQTQPLSLSLKPDPLAHLSMMPPPPALLLAEATHKASALCPNGALDLPPAALQPAAPSSSIAQPSTSSLHSHSSLAGTQPQPLSLVTKSLE

SEQ ID NO: 15740 - protein, 500 aa, Homo sapiens
MSGPGPREPPPEAGAAGGEAAVEGAGGGDAALGEPGLSFTTTDLSLVEMTEVEYTQLQHILCSHMEAAADGELETRLNSALLAAAGPGAGAGGFAAGGQGGAAPVYPVLCPSALAADAPCLGHIDFQELRMMLLSEAGAAEKTSGGGDGARARADGAAKEGAGAAAAAAGPDGAPEARAKPAVRVRLEDRFNSIPAEPPPAPRGPEPPEPGGALNNLVTLIRHPSELMNVPLQQQNKCTALVKNKTAATTTALQFTYPLFTTNACSTSGNSNLSQTQSSSNSCSVLEAAKHQDIGLPRAFSFCYQQEIESTKQTLGSRNKVLPEQVWIKVGEAALCKQALKRNRSRMRQLDTNVERRALGEIQNVGEGATATQGAWQSSESSQANLGEQAQSGPQGGRSQRRERHNRMERDRRRRIRICCDELNLLVPFCNAETDKATTLQWTTAFLKYIQERHGDSLKKEFESVFCGKTGRRLKLTRPDSLVTCPAQGSLQSSPSMEIK

SEQ ID NO: 15741 - protein, 426 aa, Homo sapiens
MEPSSWSGSESPAENMERMSDSADKPIDNDAEGVWSPDIEQSFQEALAIYPPCGRRKIILSDEGKMYGRNELIARYIKLRTGKTRTRKQVSSHIQVLARRKSRDFHSKLKDQTAKDKALQHMAAMSSAQIVSATAIHNKLGLPGIPRPTFPGAPGFWPGMIQTGQPGSSQDVKPFVQQAYPIQPAVTAPIPGFEPASAPAPSVPAWQGRSIGTTKLRLVEFSAFLEQQRDPDSYNKHLFVHIGHANHSYSDPLLESVDIRQIYDKFPEKKGGLKELFGKGPQNAFFLVKFWADLNCNIQDDAGAFYGVTSQYESSENMTVTCSTKVCSFGKQVVEKVETEYARFENGRFVYRINRSPMCEYMINFIHKLKHLPEKYMMNSVLENFTILLVVTNRDTQETLLCMACVFEVSNSEHGAQHHIYRLVKD

SEQ ID NO: 15742 - protein, 447 aa, Homo sapiens
MGEPRAGAALDDGSGWTGSEEGSEEGTGGSEGAGGDGGPDAEGVWSPDIEQSFQEALAIYPPCGRRKIILSDEGKMYGRNELIARYIKLRTGKTRTRKQVSSHIQVLARRKSREIQSKLKDQVSKDKAFQTMATMSSAQLISAPSLQAKLGPTGPQASELFQFWSGGSGPPWNVPDVKPFSQTPFTLSLTPPSTDLPGYEPPQALSPLPPPTPSPPAWQARGLGTARLQLVEFSAFVEPPDAVDSYQRHLFVHISQHCPSPGAPPLESVDVRQIYDKFPEKKGGLRELYDRGPPHAFFLVKFWADLNWGPSGEEAGAGGSISSGGFYGVSSQYESLEHMTLTCSSKVCSFGKQVVEKVETERAQLEDGRFVYRLLRSPMCEYLVNFLHKLRQLPERYMMNSVLENFTILQVVTNRDTQELLLCTAYVFEVSTSERGAQHHIYRLVRD

SEQ ID NO: 15743 - protein, 435 aa, Homo sapiens
MASNSWNASSSPGEAREDGPEGLDKGLDNDAEGVWSPDIEQSFQEALAIYPPCGRRKIILSDEGKMYGRNELIARYIKLRTGKTRTRKQVSSHIQVLARKKVREYQVGIKAMNLDQVSKDKALQSMASMSSAQIVSASVLQNKFSPPSPLPQAVFSTSSRFWSSPPLLGQQPGPSQDIKPFAQPAYPIQPPLPPTLSSYEPLAPLPSAAASVPVWQDRTIASSRLRLLEYSAFMEVQRDPDTYSKHLFVHIGQTNPAFSDPPLEAVDVRQIYDKFPEKKGGLKELYEKGPPNAFFLVKFWADLNSTIQEGPGAFYGVSSQYSSADSMTISVSTKVCSFGKQVVEKVETEYARLENGRFVYRIHRSPMCEYMINFIHKLKHLPEKYMMNSVLENFTILQVVTSRDSQETLLVIAFVFEVSTSEHGAQHHVYKLVKD

SEQ ID NO: 15744 - protein, 434 aa, Homo sapiens
MEGTAGTITSNEWSSPTSPEGSTASGGSQALDKPIDNDAEGVWSPDIEQSFQEALAIYPPCGRRKIILSDEGKMYGRNELIARYIKLRTGKTRTRKQVSSHIQVLARRKAREIQAKLKDQAAKDKALQSMAAMSSAQIISATAFHSSMALARGPGRPAVSGFWQGALPGQAGTSHDVKPFSQQTYAVQPPLPLPGFESPAGPAPSPSAPPAPPWQGRSVASSKLWMLEFSAFLEQQQDPDTYNKHLFVHIGQSSPSYSDPYLEAVDIRQIYDKFPEKKGGLKDLFERGPSNAFFLVKFWADLNTNIEDEGSSFYGVSSQYESPENMIITCSTKVCSFGKQVVEKVETEYARYENGHYSYRIHRSPLCEYMINFIHKLKHLPEKYMMNSVLENFTILQVVTNRDTQETLLCIAYVFEVSASEHGAQHHIYRLVKE

SEQ ID NO: 15745 - protein, 303 aa, Homo sapiens
MSDAGGGKKPPVDPQAGPGPGPGRAAGERGLSGSFPLVLKKLMENPPREARLDKEKGKEKLEEDEAAAASTMAVSASLMPPIWDKTIPYDGESFHLEYMDLDEFLLENGIPASPTHLAHNLLLPVAELEGKESASSSTASPPSSSTAIFQPSETVSSTESSLEKERETPSPIDPNCVEVDVNFNPDPADLVLSSVPGGELFNPRKHKFAEEDLKPQPMIKKAKKVFVPDEQKDEKYWTRRKKNNVAAKRSRDARRLKENQITIRAAFLEKENTALRTEVAELRKEVGKCKTIVSKYETKYGPL

SEQ ID NO: 15746 - protein, 439 aa, Homo sapiens
MAEDVSSAAPSPRGCADGRDADPTEEQMAETERNDEEQFECQELLECQVQVGAPEEEEEEEEDAGLVAEAEAVAAGWMLDFLCLSLCRAFRDGRSEDFRRTRNSAEAIIHGLSSLTACQLRTIYICQFLTRIAAGKTLDAQFENDERITPLESALMIWGSIEKEHDKLHEEIQNLIKIQAIAVCMENGNFKEAEEVFERIFGDPNSHMPFKSKLLMIISQKDTFHSFFQHFSYNHMMEKIKSYVNYVLSEKSSTFLMKAAAKVVESKRTRTITSQDKPSGNDVEMETEANLDTRKSVSDKQSAVTESSEGTVSLLRSHKNLFLSKLQHGTQQQDLNKKERRVGTPQSTKKKKESRRATESRIPVSKSQPVTPEKHRARKRQAWLWEEDKNLRSGVRKYGEGNWSKILLHYKFNNRTSVMLKDRWRTMKKLKLISSDSED

SEQ ID NO: 15747 - protein, 542 aa, Homo sapiens
MAAGAGTAGPASGPGVVRDPAASQPRKRPGREGGEGARRSDTMAGGGGSSDGSGRAAGRRASRSSGRARRGRHEPGLGGPAERGAGEARLEEAVNRWVLKFYFHEALRAFRGSRYGDFRQIRDIMQALLVRPLGKEHTVSRLLRVMQCLSRIEEGENLDCSFDMEAELTPLESAINVLEMIKTEFTLTEAVVESSRKLVKEAAVIICIKNKEFEKASKILKKHMSKDPTTQKLRNDLLNIIREKNLAHPVIQNFSYETFQQKMLRFLESHLDDAEPYLLTMAKKALKSESAASSTGKEDKQPAPGPVEKPPREPARQLRNPPTTIGMMTLKAAFKTLSGAQDSEAAFAKLDQKDLVLPTQALPASPALKNKRPRKDENESSAPADGEGGSELQPKNKRMTISRLVLEEDSQSTEPSAGLNSSQEAASAPPSKPTVLNQPLPGEKNPKVPKGKWNSSNGVEEKETWVEEDELFQVQAAPDEDSTTNITKKQKWTVEESEWVKAGVQKYGEGNWAAISKNYPFVNRTAVMIKDRWRTMKRLGMN

SEQ ID NO: 15748 - protein, 2136 aa, Homo sapiens
MSRSRHARPSRLVRKEDVNKKKKNSQLRKTTKGANKNVASVKTLSPGKLKQLIQERDVKKKTEPKPPVPVRSLLTRAGAARMNLDRTEVLFQNPESLTCNGFTMALRSTSLSRRLSQPPLVVAKSKKVPLSKGLEKQHDCDYKILPALGVKHSENDSVPMQDTQVLPDIETLIGVQNPSLLKGKSQETTQFWSQRVEDSKINIPTHSGPAAEILPGPLEGTRCGEGLFSEETLNDTSGSPKMFAQDTVCAPFPQRATPKVTSQGNPSIQLEELGSRVESLKLSDSYLDPIKSEHDCYPTSSLNKVIPDLNLRNCLALGGSTSPTSVIKFLLAGSKQATLGAKPDHQEAFEATANQQEVSDTTSFLGQAFGAIPHQWELPGADPVHGEALGETPDLPEIPGAIPVQGEVFGTILDQQETLGMSGSVVPDLPVFLPVPPNPIATFNAPSKWPEPQSTVSYGLAVQGAIQILPLGSGHTPQSSSNSEKNSLPPVMAISNVENEKQVHISFLPANTQGFPLAPERGLFHASLGIAQLSQAGPSKSDRGSSQVSVTSTVHVVNTTVVTMPVPMVSTSSSSYTTLLPTLEKKKRKRCGVCEPCQQKTNCGECTYCKNRKNSHQICKKRKCEELKKKPSVVVPLEVIKENKRPQREKKPKVLKADFDNKPVNGPKSESMDYSRCGHGEEQKLELNPHTVENVTKNEDSMTGIEVEKWTQNKKSQLTDHVKGDFSANVPEAEKSKNSEVDKKRTKSPKLFVQTVRNGIKHVHCLPAETNVSFKKFNIEEFGKTLENNSYKFLKDTANHKNAMSSVATDMSCDHLKGRSNVLVFQQPGFNCSSIPHSSHSIINHHASIHNEGDQPKTPENIPSKEPKDGSPVQPSLLSLMKDRRLTLEQVVAIEALTQLSEAPSENSSPSKSEKDEESEQRTASLLNSCKAILYTVRKDLQDPNLQGEPPKLNHCPSLEKQSSCNTVVFNGQTTTLSNSHINSATNQASTKSHEYSKVTNSLSLFIPKSNSSKIDTNKSIAQGIITLDNCSNDLHQLPPRNNEVEYCNQLLDSSKKLDSDDLSCQDATHTQIEEDVATQLTQLASIIKINYIKPEDKKVESTPTSLVTCNVQQKYNQEKGTIQQKPPSSVHNNHGSSLTKQKNPTQKKTKSTPSRDRRKKKPTVVSYQENDRQKWEKLSYMYGTICDIWIASKFQNFGQFCPHDFPTVFGKISSSTKIWKPLAQTRSIMQPKTVFPPLTQIKLQRYPESAEEKVKVEPLDSLSLFHLKTESNGKAFTDKAYNSQVQLTVNANQKAHPLTQPSSPPNQCANVMAGDDQIRFQQVVKEQLMHQRLPTLPGISHETPLPESALTLRNVNVVCSGGITVVSTKSEEEVCSSSFGTSEFSTVDSAQKNFNDYAMNFFTNPTKNLVSITKDSELPTCSCLDRVIQKDKGPYYTHLGAGPSVAAVREIMENRYGQKGNAIRIEIVVYTGKEGKSSHGCPIAKWVLRRSSDEEKVLCLVRQRTGHHCPTAVMVVLIMVWDGIPLPMADRLYTELTENLKSYNGHPTDRRCTLNENRTCTCQGIDPETCGASFSFGCSWSMYFNGCKFGRSPSPRRFRIDPSSPLHEKNLEDNLQSLATRLAPIYKQYAPVAYQNQVEYENVARECRLGSKEGRPFSGVTACLDFCAHPHRDIHNMNNGSTVVCTLTREDNRSLGVIPQDEQLHVLPLYKLSDTDEFGSKEGMEAKIKSGAIEVLAPRRKKRTCFTQPVPRSGKKRAAMMTEVLAHKIRAVEKKPIPRIKRKNNSTTTNNSKPSSLPTLGSNTETVQPEVKSETEPHFILKSSDNTKTYSLMPSAPHPVKEASPGFSWSPKTASATPAPLKNDATASCGFSERSSTPHCTMPSGRLSGANAAAADGPGISQLGEVAPLPTLSAPVMEPLINSEPSTGVTEPLTPHQPNHQPSFLTSPQDLASSPMEEDEQHSEADEPPSDEPLSDDPLSPAEEKLPHIDEYWSDSEHIFLDANIGGVAIAPAHGSVLIECARRELHATTPVEHPNRNHPTRLSLVFYQHKNLNKPQHGFELNKIKFEAKEAKNKKMKASEQKDQAANEGPEQSSEVNELNQIPSHKALTLTHDNVVTVSPYALTHVAGPYNHWV

SEQ ID NO: 15749 - protein, 2002 aa, Homo sapiens
MEQDRTNHVEGNRLSPFLIPSPPICQTEPLATKLQNGSPLPERAHPEVNGDTKWHSFKSYYGIPCMKGSQNSRVSPDFTQESRGYSKCLQNGGIKRTVSEPSLSGLLQIKKLKQDQKANGERRNFGVSQERNPGESSQPNVSDLSDKKESVSSVAQENAVKDFTSFSTHNCSGPENPELQILNEQEGKSANYHDKNIVLLKNKAVLMPNGATVSASSVEHTHGELLEKTLSQYYPDCVSIAVQKTTSHINAINSQATNELSCEITHPSHTSGQINSAQTSNSELPPKPAAVVSEACDADDADNASKLAAMLNTCSFQKPEQLQQQKSVFEICPSPAENNIQGTTKLASGEEFCSGSSSNLQAPGGSSERYLKQNEMNGAYFKQSSVFTKDSFSATTTPPPPSQLLLSPPPPLPQVPQLPSEGKSTLNGGVLEEHHHYPNQSNTTLLREVKIEGKPEAPPSQSPNPSTHVCSPSPMLSERPQNNCVNRNDIQTAGTMTVPLCSEKTRPMSEHLKHNPPIFGSSGELQDNCQQLMRNKEQEILKGRDKEQTRDLVPPTQHYLKPGWIELKAPRFHQAESHLKRNEASLPSILQYQPNLSNQMTSKQYTGNSNMPGGLPRQAYTQKTTQLEHKSQMYQVEMNQGQSQGTVDQHLQFQKPSHQVHFSKTDHLPKAHVQSLCGTRFHFQQRADSQTEKLMSPVLKQHLNQQASETEPFSNSHLLQHKPHKQAAQTQPSQSSHLPQNQQQQQKLQIKNKEEILQTFPHPQSNNDQQREGSFFGQTKVEECFHGENQYSKSSEFETHNVQMGLEEVQNINRRNSPYSQTMKSSACKIQVSCSNNTHLVSENKEQTTHPELFAGNKTQNLHHMQYFPNNVIPKQDLLHRCFQEQEQKSQQASVLQGYKNRNQDMSGQQAAQLAQQRYLIHNHANVFPVPDQGGSHTQTPPQKDTQKHAALRWHLLQKQEQQQTQQPQTESCHSQMHRPIKVEPGCKPHACMHTAPPENKTWKKVTKQENPPASCDNVQQKSIIETMEQHLKQFHAKSLFDHKALTLKSQKQVKVEMSGPVTVLTRQTTAAELDSHTPALEQQTTSSEKTPTKRTAASVLNNFIESPSKLLDTPIKNLLDTPVKTQYDFPSCRCVEQIIEKDEGPFYTHLGAGPNVAAIREIMEERFGQKGKAIRIERVIYTGKEGKSSQGCPIAKWVVRRSSSEEKLLCLVRERAGHTCEAAVIVILILVWEGIPLSLADKLYSELTETLRKYGTLTNRRCALNEERTCACQGLDPETCGASFSFGCSWSMYYNGCKFARSKIPRKFKLLGDDPKEEEKLESHLQNLSTLMAPTYKKLAPDAYNNQIEYEHRAPECRLGLKEGRPFSGVTACLDFCAHAHRDLHNMQNGSTLVCTLTREDNREFGGKPEDEQLHVLPLYKVSDVDEFGSVEAQEEKKRSGAIQVLSSFRRKVRMLAEPVKTCRQRKLEAKKAAAEKLSSLENSSNKNEKEKSAPSRTKQTENASQAKQLAELLRLSGPVMQQSQQPQPLQKQPPQPQQQQRPQQQQPHHPQTESVNSYSASGSTNPYMRRPNPVSPYPNSSHTSDIYGSTSPMNFYSTSSQAAGSYLNSSNPMNPYPGLLNQNTQYPSYQCNGNLSVDNCSPYLGSYSPQSQPMDLYRYPSQDPLSKLSLPPIHTLYQPRFGNSQSFTSKYLGYGNQNMQGDGFSSCTIRPNVHHVGKLPPYPTHEMDGHFMGATSRLPPNLSNPNMDYKNGEHHSPSHIIHNYSAAPGMFNSSLHALHLQNKENDMLSHTANGLSKMLPALNHDRTACVQGGLHKLSDANGQEKQPLALVQGVASGAEDNDEVWSDSEQSFLDPDIGGVAVAPTHGSILIECAKRELHATTPLKNPNRNHPTRISLVFYQHKSMNEPKHGLALWEAKMAEKAREKEEECEKYGPDYVPQKSHGKKVKREPAEPHETSEPTYLRFIKSLAERTMSVTTDSTVTTSPYAFTRVTGPYNRYI

SEQ ID NO: 15750 - protein, 1660 aa, Homo sapiens
MDSGPVYHGDSRQLSASGVPVNGAREPAGPSLLGTGGPWRVDQKPDWEAAPGPAHTARLEDAHDLVAFSAVAEAVSSYGALSTRLYETFNREMSREAGNNSRGPRPGPEGCSAGSEDLDTLQTALALARHGMKPPNCNCDGPECPDYLEWLEGKIKSVVMEGGEERPRLPGPLPPGEAGLPAPSTRPLLSSEVPQISPQEGLPLSQSALSIAKEKNISLQTAIAIEALTQLSSALPQPSHSTPQASCPLPEALSPPAPFRSPQSYLRAPSWPVVPPEEHSSFAPDSSAFPPATPRTEFPEAWGTDTPPATPRSSWPMPRPSPDPMAELEQLLGSASDYIQSVFKRPEALPTKPKVKVEAPSSSPAPAPSPVLQREAPTPSSEPDTHQKAQTALQQHLHHKRSLFLEQVHDTSFPAPSEPSAPGWWPPPSSPVPRLPDRPPKEKKKKLPTPAGGPVGTEKAAPGIKPSVRKPIQIKKSRPREAQPLFPPVRQIVLEGLRSPASQEVQAHPPAPLPASQGSAVPLPPEPSLALFAPSPSRDSLLPPTQEMRSPSPMTALQPGSTGPLPPADDKLEELIRQFEAEFGDSFGLPGPPSVPIQDPENQQTCLPAPESPFATRSPKQIKIESSGAVTVLSTTCFHSEEGGQEATPTKAENPLTPTLSGFLESPLKYLDTPTKSLLDTPAKRAQAEFPTCDCVEQIVEKDEGPYYTHLGSGPTVASIRELMEERYGEKGKAIRIEKVIYTGKEGKSSRGCPIAKWVIRRHTLEEKLLCLVRHRAGHHCQNAVIVILILAWEGIPRSLGDTLYQELTDTLRKYGNPTSRRCGLNDDRTCACQGKDPNTCGASFSFGCSWSMYFNGCKYARSKTPRKFRLAGDNPKEEEVLRKSFQDLATEVAPLYKRLAPQAYQNQVTNEEIAIDCRLGLKEGRPFAGVTACMDFCAHAHKDQHNLYNGCTVVCTLTKEDNRCVGKIPEDEQLHVLPLYKMANTDEFGSEENQNAKVGSGAIQVLTAFPREVRRLPEPAKSCRQRQLEARKAAAEKKKIQKEKLSTPEKIKQEALELAGITSDPGLSLKGGLSQQGLKPSLKVEPQNHFSSFKYSGNAVVESYSVLGNCRPSDPYSMNSVYSYHSYYAQPSLTSVNGFHSKYALPSFSYYGFPSSNPVFPSQFLGPGAWGHSGSSGSFEKKPDLHALHNSLSPAYGGAEFAELPSQAVPTDAHHPTPHHQQPAYPGPKEYLLPKAPLLHSVSRDPSPFAQSSNCYNRSIKQEPVDPLTQAEPVPRDAGKMGKTPLSEVSQNGGPSHLWGQYSGGPSMSPKRTNGVGGSWGVFSSGESPAIVPDKLSSFGASCLAPSHFTDGQWGLFPGEGQQAASHSGGRLRGKPWSPCKFGNSTSALAGPSLTEKPWALGAGDFNSALKGSPGFQDKLWNPMKGEEGRIPAAGASQLDRAWQSFGLPLGSSEKLFGALKSEEKLWDPFSLEEGPAEEPPSKGAVKEEKGGGGAEEEEEELWSDSEHNFLDENIGGVAVAPAHGSILIECARRELHATTPLKKPNRCHPTRISLVFYQHKNLNQPNHGLALWEAKMKQLAERARARQEEAARLGLGQQEAKLYGKKRKWGGTVVAEPQQKEKKGVVPTRQALAVPTDSAVTVSSYAYTKVTGPYSRWI

SEQ ID NO: 15751 - protein, 246 aa, Homo sapiens; identical to SEQ ID NO: 13129

SEQ ID NO: 15752 - protein, 437 aa, Homo sapiens
MLWKLTDNIKYEDCEDRHDGTSNGTARLPQLGTVGQSPYTSAPPLSHTPNADFQPPYFPPPYQPIYPQSQDPYSHVNDPYSLNPLHAQPQPQHPGWPGQRQSQESGLLHTHRGLPHQLSGLDPRRDYRRHEDLLHGPHALSSGLGDLSIHSLPHAIEEVPHVEDPGINIPDQTVIKKGPVSLSKSNSNAVSAIPINKDNLFGGVVNPNEVFCSVPGRLSLLSSTSKYKVTVAEVQRRLSPPECLNASLLGGVLRRAKSKNGGRSLREKLDKIGLNLPAGRRKAANVTLLTSLVEGEAVHLARDFGYVCETEFPAKAVAEFLNRQHSDPNEQVTRKNMLLATKQICKEFTDLLAQDRSPLGNSRPNPILEPGIQSCLTHFNLISHGFGSPAVCAAVTALQNYLTEALKAMDKMYLSNNPNSHTDNNAKSSDKEEKHRK

SEQ ID NO: 15753 - protein, 460 aa, Homo sapiens
MHSPPRDQAAIMLWKLVENVKYEDIYEDRHDGVPSHSSRLSQLGSVSQGPYSSAPPLSHTPSSDFQPPYFPPPYQPLPYHQSQDPYSHVNDPYSLNPLHQPQQHPWGQRQRQEVGSEAGSLLPQPRAALPQLSGLDPRRDYHSVRRPDVLLHSAHHGLDAGMGDSLSLHGLGHPGMEDVQSVEDANNSGMNLLDQSVIKKVPVPPKSVTSLMMNKDGFLGGMSVNTGEVFCSVPGRLSLLSSTSKYKVTVGEVQRRLSPPECLNASLLGGVLRRAKSKNGGRSLRERLEKIGLNLPAGRRKAANVTLLTSLVEGEAVHLARDFGYICETEFPAKAVSEYLNRQHTDPSDLHSRKNMLLATKQLCKEFTDLLAQDRTPIGNSRPSPILEPGIQSCLTHFSLITHGFGAPAICAALTALQNYLTEALKGMDKMFLNNTTTNRHTSGEGPGSKTGDKEEKHRK

SEQ ID NO: 15754 - protein, 450 aa, Homo sapiens
MLWKITDNVKYEEDCEDRHDGSSNGNPRVPHLSSAGQHLYSPAPPLSHTGVAEYQPPPYFPPPYQQLAYSQSADPYSHLGEAYAAAINPLHQPAPTGSQQQAWPGRQSQEGAGLPSHHGRPAGLLPHLSGLEAGAVSARRDAYRRSDLLLPHAHALDAAGLAENLGLHDMPHQMDEVQNVDDQHLLLHDQTVIRKGPISMTKNPLNLPCQKELVGAVMNPTEVFCSVPGRLSLLSSTSKYKVTVAEVQRRLSPPECLNASLLGGVLRRAKSKNGGRSLREKLDKIGLNLPAGRRKAAHVTLLTSLVEGEAVHLARDFAYVCEAEFPSKPVAEYLTRPHLGGRNEMAARKNMLLAAQQLCKEFTELLSQDRTPHGTSRLAPVLETNIQNCLSHFSLITHGFGSQAICAAVSALQNYIKEALIVIDKSYMNPGDQSPADSNKTLEKMEKHRK

SEQ ID NO: 15755 - protein, 452 aa, Homo sapiens
MSTTFPGLVHDAEIRHDGSNSYRLMQLGCLESVANSTVAYSSSSPLTYSTTGTEFASPYFSTNHQYTPLHHQSFHYEFQHSHPAVTPDAYSLNSLHHSQQYYQQIHHGEPTDFINLHNARALKSSCLDEQRRELGCLDAYRRHDLSLMSHGSQYGMHPDQRLLPGPSLGLAAAGADDLQGSVEAQCGLVLNGQGGVIRRGGTCVVNPTDLFCSVPGRLSLLSSTSKYKVTIAEVKRRLSPPECLNASLLGGILRRAKSKNGGRCLREKLDRLGLNLPAGRRKAANVTLLTSLVEGEALHLARDFGYTCETEFPAKAVGEHLARQHMEQKEQTARKKMILATKQICKEFQDLLSQDRSPLGSSRPTPILDLDIQRHLTHFSLITHGFGTPAICAALSTFQTVLSEMLNYLEKHTTHKNGGAADSGQGHANSEKAPLRKTSEAAVKEGKTEKTD

SEQ ID NO: 15756 - protein, 442 aa, Homo sapiens
MLVHTYSAMERPDGLGAAAGGARLSSLPQAAYGPAPPLCHTPAATAAAEFQPPYFPPPYPQPPLPYGQAPDAAAAFPHLAGDPYGGLAPLAQPQPPQAAWAAPRAAARAHEEPPGLLAPPARALGLDPRRDYATAVPRLLHGLADGAHGLADAPLGLPGLAAAPGLEDLQAMDEPGMSLLDQSVIKKVPIPSKASSLSALSLAKDSLVGGITNPGEVFCSVPGRLSLLSSTSKYKVTVGEVQRRLSPPECLNASLLGGVLRRAKSKNGGRCLRERLEKIGLNLPAGRRKAANVTLLTSLVEGEAVHLARDFGYVCETEFPAKAAAEYLCRQHADPGELHSRKSMLLAAKQICKEFADLMAQDRSPLGNSRPALILEPGVQSCLTHFSLITHGFGGPAICAALTAFQNYLLESLKGLDKMFLSSVGSGHGETKASEKDAKHRK

SEQ ID NO: 15757 - protein, 338 aa, Homo sapiens
MEYFMVPTQKVPSLQHFRKTEKEVIGGLCSLANIPLTPETQRDQERRIRREIANSNERRRMQSINAGFQSLKTLIPHTDGEKLSKAAILQQTAEYIFSLEQEKTRLLQQNTQLKRFIQELSGSSPKRRRAEDKDEGIGSPDIWEDEKAEDLRREMIELRQQLDKERSVRMMLEEQVRSLEAHMYPEKLKVIAQQVQLQQQQEQVRLLHQEKLEREQQQLRTQLLPPPAPTHHPTVIVPAPPPPPSHHINVVTMGPSSVINSVSTSRQNLDTIVQAIQHIEGTQEKQELEEEQRRAVIVKPVRSCPEAPTSDTASDSEASDSDAMDQSREEPSGDGELP

SEQ ID NO: 15758 - protein, 346 aa, Homo sapiens
MAASGKLSTCRLPPLPTIREIIKLLRLQAAKQLSQNFLLDLRLTDKIVRKAGNLTNAYVYEVGPGPGGITRSILNADVAELLVVEKDTRFIPGLQMLSDAAPGKLRIVHGDVLTFKVEKAFSESLKRPWEDDPPNVHIIGNLPFSVSTPLIIKWLENISCRDGPFVYGRTQMTLTFQKEVAERLAANTGSKQRSRLSVMAQYLCNVRHIFTIPGQAFVPKPEVDVGVVHFTPLIQPKIEQPFKLVEKVVQNVFQFRRKYCHRGLRMLFPEAQRLESTGRLLELADIDPTLRPRQLSISHFKSLCDVYRKMCDEDPQLFAYNFREELKRRKSKNEEKEEDDAENYRL

SEQ ID NO: 15759 - protein, 396 aa, Homo sapiens
MWIPVVGLPRRLRLSALAGAGRFCILGSEAATRKHLPARNHCGLSDSSPQLWPEPDFRNPPRKASKASLDFKRYVTDRRLAETLAQIYLGKPSRPPHLLLECNPGPGILTQALLEAGAKVVALESDKTFIPHLESLGKNLDGKLRVIHCDFFKLDPRSGGVIKPPAMSSRGLFKNLGIEAVPWTADIPLKVVGMFPSRGEKRALWKLAYDLYSCTSIYKFGRIEVNMFIGEKEFQKLMADPGNPDLYHVLSVIWQLACEIKVLHMEPWSSFDIYTRKGPLENPKRRELLDQLQQKLYLIQMIPRQNLFTKNLTPMNYNIFFHLLKHCFGRRSATVIDHLRSLTPLDARDILMQIGKQEDEKVVNMHPQDFKTLFETIERSKDCAYKWLYDETLEDR

SEQ ID NO: 15760 - protein, 502 aa, Homo sapiens
MAWALKLPLADEVIESGLVQDFDASLSGIGQELGAGAYSMSDVLALPIFKQEESSLPPDNENKILPFQYVLCAATSPAVKLHDETLTYLNQGQSYEIRMLDNRKLGELPEINGKLVKSIFRVVFHDRRLQYTEHQQLEGWRWNRPGDRILDIDIPMSVGIIDPRANPTQLNTVEFLWDPAKRTSVFIQVHCISTEFTMRKHGGEKGVPFRVQIDTFKENENGEYTEHLHSASCQIKVFKPKGADRKQKTDREKMEKRTPHEKEKYQPSYETTILTECSPWPEITYVNNSPSPGFNSSHSSFSLGEGNGSPNHQPEPPPPVTDNLLPTTTPQEAQQWLHRNRFSTFTRLFTNFSGADLLKLTRDDVIQICGPADGIRLFNALKGRMVRPRLTIYVCQESLQLREQQQQQQQQQQKHEDGDSNGTFFVYHAIYLEELTAVELTEKIAQLFSISPCQISQIYKQGPTGIHVLISDEMIQNFQEEACFILDTMKAETNDSYHIILK

SEQ ID NO: 15761 - protein, 479 aa, Homo sapiens
MLFWHTQPEHYNQHNSGSYLRDVLALPIFKQEEPQLSPENEARLPPLQYVLCAATSPAVKLHEETLTYLNQGQSYEIRLLENRKLGDFQDLNTKYVKSIIRVVFHDRRLQYTEHQQLEGWRWSRPGDRILDIDIPLSVGILDPRASPTQLNAVEFLWDPAKRASAFIQVHCISTEFTPRKHGGEKGVPFRVQIDTFKQNENGEYTEHLHSASCQIKVFKPKGADRKQKTDREKMEKRTAQEKEKYQPSYETTILTECSPWPDVAYQVNSAPSPSYNGSPNSFGLGEGNASPTHPVEALPVGSDHLLPSASIQDAQQWLHRNRFSQFCRLFASFSGADLLKMSRDDLVQICGPADGIRLFNAIKGRNVRPKMTIYVCQELEQNRVPLQQKRDGSGDSNLSVYHAIFLEELTTLELIEKIANLYSISPQHIHRVYRQGPTGIHVVVSNEMVQNFQDESCFVLSTIKAESNDGYHIILKCGL

SEQ ID NO: 15762 - protein, 410 aa, Homo sapiens
MAKDAGLIEANGELKVFIDQNLSPGKGVVSLVAVHPSTVNPLGKQLLPKTFGQSNVNIAQQVVIGTPQRPAASNTLVVGSPHTPSTHFASQNQPSDSSPWSAGKRNRKGEKNGKGLRHFSMKVCEKVQRKGTTSYNEVADELVAEFSAADNHILPNESAYDQKNIRRRVYDALNVLMAMNIISKEKKEIKWIGLPTNSAQECQNLEVERQRRLERIKQKQSQLQELILQQIAFKNLVQRNRHAEQQASRPPPPNSVIHLPFIIVNTSKKTVIDCSISNDKFEYLFNFDNTFEIHDDIEVLKRMGMACGLESGSCSAEDLKMARSLVPKALEPYVTEMAQGTVGGVFITTAGSTSNGTRFSASDLTNGADGMLATSSNGSQYSGSRVETPVSYVGEDDEEDDDFNENDEDD

SEQ ID NO: 15763 - protein, 446 aa, Homo sapiens
MTAKNVGLTSTNAEVRGFIDQNLSPTKGNISFVAFPVSNTNSPTKILPKTLGPINVNVGPQMIISTPQRLTSSGSVLIGSPYTPAPAMVTQTHIAEATGWVPGDRKRARKFIDSDFSESKRSKKGDKNGKGLRHFSMKVCEKVQRKGTTSYNEVADELVSEFTNSNNHLAADSAYDQKNIRRRVYDALNVLMAMNIISKEKKEIKWIGLPTNSAQECQNLEIEKQRRIERIKQKRAQLQELLLQQIAFKNLVQRNRQNEQQNQGPPALNSTIQLPFIIINTSRKTVIDCSISSDKFEYLFNFDNTFEIHDDIEVLKRMGMSFGLESGKCSLEDLKLAKSLVPKALEGYITDISTGPSWLNQGLLLNSTQSVSNLDLTTGATLPQSSVNQGLCLDAEVALATGQFLAPNSHQSSSAASHCSESRGETPCSFNDEDEEDDEEDSSSPE

SEQ ID NO: 15764 - protein, 405 aa, Homo sapiens
MAKYVSLTEANEELKVLMDENQTSRPVAVHTSTVNPLGKQLLPKTFGQSSVNIDQQVVIGMPQRPAASNIPVVGSPNPPSTHFASQNQHSYSSPPWAGQHNRKGEKNGMGLCRLSMKVWETVQRKGTTSCQEVVGELVAKFRAASNHASPNESAYDVKNIKRRTYDALNVLMAMNIISREKKKIKWIGLTTNSAQNCQNLRVERQKRLERIKQKQSELQQLILQQIAFKNLVLRNQYVEEQVSQRPLPNSVIHVPFIIISSSKKTVINCSISDDKSEYLFKFNSSFEIHDDTEVLMWMGMTFGLESGSCSAEDLKMARNLVPKALEPYVTEMAQGTFGGVFTTAGSRSNGTWLSASDLTNIAIGMLATSSGGSQYSGSRVETPAVEEEEEEDNNDDDLSENDEDD

SEQ ID NO: 15765 - protein, 575 aa, Homo sapiens
MSHAAEPARDGVEASAEGPRAVFVLLEERRPADSAQLLSLNSLLPESGIVADIELENVLDPDSFYELKSQPLPLRSSLPISLQATPATPATLSASSSAGGSRTPAMSSSSSSRVLLRQQLMRAQAQEQERRERREQAAAAPFPSPAPASPAISVVGVSAGGHTLSRPPPAQVPREVLKVQTHLENPTRYHLQQARRQQVKQYLSTTLGPKLASQALTPPPGPASAQPLPAPEAAHTTGPTGSAPNSPMALLTIGSSSEKEIDDVIDEIISLESSYNDEMLSYLPGGTTGLQLPSTLPVSGNLLDVYSSQGVATPAITVSNSCPAELPNIKREISETEAKALLKERQKKDNHNLIERRRRFNINDRIKELGTLIPKSSDPEMRWNKGTILKASVDYIRKLQKEQQRSKDLESRQRSLEQANRSLQLRIQELELQAQIHGLPVPPTPGLLSLATTSASDSLKPEQLDIEEEGRPGAATFHVGGGPAQNAPHQQPPAPPSDALLDLHFPSDHLGDLGDPFHLGLEDILMEEEEGVVGGLSGGALSPLRAASDPLLSSVSPAVSKASSRRSSFSMEEES

SEQ ID NO: 15766 - protein, 476 aa, Homo sapiens
MASRIGLRMQLMREQAQQEEQRERMQQQAVMHYMQQQQQQQQQQLGGPPTPAINTPVHFQSPPPVPGEVLKVQSYLENPTSYHLQQSQHQKVREYLSETYGNKFAAHISPAQGSPKPPPAASPGVRAGHVLSSSAGNSAPNSPMAMLHIGSNPERELDDVIDNIMRLDDVLGYINPEMQMPNTLPLSSSHLNVYSSDPQVTASLVGVTSSSCPADLTQKRELTDAESRALAKERQKKDNHNLIERRRRFNINDRIKELGMLIPKANDLDVRWNKGTILKASVDYIRRMQKDLQKSRELENHSRRLEMTNKQLWLRIQELEMQARVHGLPTTSPSGMNMAELAQQVVKQELPSEEGPGEALMLGAEVPDPEPLPALPPQAPLPLPTQPPSPFHHLDFSHSLSFGGREDEGPPGYPEPLAPGHGSPFPSLSKKDLDLMLLDDSLLPLASDPLLSTMSPEASKASSRRSSFSMEEGDVL

SEQ ID NO: 15767 - protein, 347 aa, Homo sapiens
MTLDHQIINPTLKWSQPAVPSGGPLVQHAHTTLDSDAGLTENPLTKLLAIGKEDDNAQWHMEDVIEDIIGMESSFKEEGADSPLLMQRTLSGSILDVYSGEQGISPINMGLTSASCPSSLPMKREITETDTRALAKERQKKDNHNLIERRRRYNINYRIKELGTLIPKSNDPDMRWNKGTILKASVEYIKWLQKEQQRARELEHRQKKLEQANRRLLLRIQELEIQARTHGLPTLASLGTVDLGAHVTKQQSHPEQNSVDYCQQLTVSQGPSPELCDQAIAFSDPLSYFTDLSFSAALKEEQRLDGMLLDDTISPFGTDPLLSATSPAVSKESSRRSSFSSDDGDEL

SEQ ID NO: 15768 - protein, 401 aa, Homo sapiens
MVLAQSRVSAGVGSPHCSGSGGGGSDSFPWPASHPGNPQCSFSTAFLASPRLSRGTLAYLPPAPWSSLATPSALLGSSCAPPPPPARCPQPRALSPELGTKAGPRRPHRWELPRSPSQGAQGPAPRRRLLETMKGIVAASGSETEDEDSMDIPLDLSSSAGSGKRRRRGNLPKESVQILRDWLYEHRYNAYPSEQEKALLSQQTHLSTLQVCNWFINARRRLLPDMLRKDGKDPNQFTISRRGAKISETSSVESVMGIKNFMPALEETPFHSCTAGPNPTLGRPLSPKPSSPGSVLARPSVICHTTVTALKDVPFSLCQSVGVGQNTDIQQIAAKNFTDTSLMYPEDTCKSGPSTNTQSGLFNTPPPTPPDLNQDFSGFQLLVDVALKRAAEMELQAKLTA

SEQ ID NO: 15769 - protein, 237 aa, Homo sapiens
MSDSDLGEDEGLLSLAGKRKRRGNLPKESVKILRDWLYLHRYNAYPSEQEKLSLSGQTNLSVLQICNWFINARRRLLPDMLRKDGKDPNQFTISRRGGKASDVALPRGSSPSVLAVSVPAPTNVLSLSVCSMPLHSGQGEKPAAPFPRGELESPKPLVTPGSTLTLLTRAEAGSPTGGLFNTPPPTPPEQDKEDFSSFQLLVEVALQRAAEMELQKQQDPSLPLLHTPIPLVSENPQ

SEQ ID NO: 15770 - protein, 241 aa, Homo sapiens
MEAAADGPAETQSPVEKDSPAKTQSPAQDTSIMSRNNADTGRVLALPEHKKKRKGNLPAESVKILRDWMYKHRFKAYPSEEEKQMLSEKTNLSLLQISNWFINARRRILPDMLQQRRNDPIIGHKTGKDAHATHLQSTEASVPAKSGPSGPDNVQSLPLWPLPKGQMSREKQPDPESAPSQKLTGIAQPKKKVKVSVTSPSSPELVSPEEHADFSSFLLLVDAAVQRAAELELEKKQEPNP

SEQ ID NO: 15771 - protein, 185 aa, Homo sapiens
MEAAADGPAETQSPVEKDSPAKTQSPAQDTSIMSRNNADTGRVLALPEHKKKRKGNLPAESVKILRDWMYKHRFKAYPSEEEKQMLSEKTNLSLLRISNWFINARRRILPDMLQQRRNDPIIGHKTGKDAHATHLQSTEASVPAKSGPVVQTMYKACPCGPCQRARCQERSNQIRSRPLARSSPE

SEQ ID NO: 15772 - protein, 213 aa, Homo sapiens
MVQSCSAYGCKNRYDKDKPVSFHKFPLTRPSLCKEWEAAVRRKNFKPTKYSSICSEHFTPDCFKRECNNKLLKENAVPTIFLCTEPHDKKEDLLEPQEQLPPPPLPPPVSQVDAAIGLLMPPLQTPVNLSVFCDHNYTVEDTMHQRKRIHQLEQQVEKLRKKLKTAQQRCRRQERQLEKLKEVVHFQKEKDDVSERGYVILPNDYFEIVEVPA

SEQ ID NO: 15773 - protein, 257 aa, Homo sapiens
MPARCVAAHCGNTTKSGKSLFRFPKDRAVRLLWDRFVRGCRADWYGGNDRSVICSDHFAPACFDVSSVIQKNLRFSQRLRLVAGAVPTLHRVPAPAPKRGEEGDQAGRLDTRGELQAARHSEAAPGPVSCTRPRAGKQAAASQITCENELVQTQPHADNPSNTVTSVPTHCEEGPVHKSTQISLKRPRHRSVGIQAKVKAFGKRLCNATTQTEELWSRTSSLFDIYSSDSETDTDWDIKSEQSDLSYMAVQVKEETC

SEQ ID NO: 15774 - protein, 314 aa, Homo sapiens
MPGFTCCVPGCYNNSHRDKALHFYTFPKDAELRRLWLKNVSRAGVSGCFSTFQPTTGHRLCSVHFQGGRKTYTVRVPTIFPLRGVNERKVARRPAGAAAARRRQQQQQQQQQQQQQQQQQQQQQQQQQQQQQSSPSASTAQTAQLQPNLVSASAAVLLTLQATVDSSQAPGSVQPAPITPTGEDVKPIDLTVQVEFAAAEGAAAAAAASELQAATAGLEAAECPMGPQLVVVGEEGFPDTGSDHSYSLSSGTTEEELLRKLNEQRDILALMEVKMKEMKGSIRHLRLTEAKLREELREKDRLLAMAVIRKKHGM

SEQ ID NO: 15775 - protein, 761 aa, Homo sapiens
MPNFCAAPNCTRKSTQSDLAFFRFPRDPARCQKWVENCRRADLEDKTPDQLNKHYRLCAKHFETSMICRTSPYRTVLRDNAIPTIFDLTSHLNNPHSRHRKRIKELSEDEIRTLKQKKIDETSEQEQKHKETNNSNAQNPSEEEGEGQDEDILPLTLEEKENKEYLKSLFEILILMGKQNIPLDGHEADEIPEGLFTPDNFQALLECRINSGEEVLRKRFETTAVNTLFCSKTQQRQMLEICESCIREETLREVRDSHFFSIITDDVVDIAGEEHLPVLVRFVDESHNLREEFIGFLPYEADAEILAVKFHTMITEKWGLNMEYCRGQAYIVSSGFSSKMKVVASRLLEKYPQAIYTLCSSCALNMWLAKSVPVMGVSVALGTIEEVCSFFHRSPQLLLELDNVISVLFQNSKERGKELKEICHSQWTGRHDAFEILVELLQALVLCLDGINSDTNIRWNNYIAGRAFVLCSAVSDFDFIVTIVVLKNVLSFTRAFGKNLQGQTSDVFFAAGSLTAVLHSLNEVMENIEVYHEFWFEEATNLATKLDIQMKLPGKFRRAHQGNLESQLTSESYYKETLSVPTVEHIIQELKDIFSEQHLKALKCLSLVPSVMGQLKFNTSEEHHADMYRSDLPNPDTLSAELHCWRIKWKHRGKDIELPSTIYEALHLPDIKFFPNVYALLKVLCILPVMKVENERYENGRKRLKAYLRNTLTDQRSSNLALLNINFDIKHDLDLMVDTYIKLYTSKSELPTDNSETVENT

SEQ ID NO: 15776 - protein, 228 aa, Homo sapiens
MPTNCAAAGCATTYNKHINISFHRFPLDPKRRKEWVRLVRRKNFVPGKHTFLCSKHFEASCFDLTGQTRRLKMDAVPTIFDFCTHIKSMKLKSRNLLKKNNSCSPAGPSNLKSNISSQQVLLEHSYAFRNPMEAKKRIIKLEKEIASLRRKMKTCLQKERRATRRWIKATCLVKNLEANSVLPKGTSEHMLPTALSSLPLEDFKILEQDQQDKTLLSLNLKQTKSTFI

SEQ ID NO: 15777 - protein, 239 aa, Homo sapiens
MPKSCAARQCCNRYSSRRKQLTFHRFPFSRPELLKEWVLNIGRGNFKPKQHTVICSEHFRPECFSAFGNRKNLKHNAVPTVFAFQDPTQQVRENTDPASERGNASSSQKEKVLPEAGAGEDSPGRNMDTALEELQLPPNAEGHVKQVSPRRPQATEAVGRPTGPAGLRRTPNKQPSDHSYALLDLDSLKKKLFLTLKENEKLRKRLQAQRLVMRRMSSRLRACKGHQGLQARLGPEQQS

SEQ ID NO: 15778 - protein, 577 aa, Homo sapiens
MVICCAAVNCSNRQGKGEKRAVSFHRFPLKDSKRLIQWLKAVQRDNWTPTKYSFLCSEHFTKDSFSKRLEDQHRLLKPTAVPSIFHLTEKKRGAGGHGRTRRKDASKATGGVRGHSSAATSRGAAGWSPSSSGNPMAKPESRRLKQAALQGEATPRAAQEAASQEQAQQALERTPGDGLATMVAGSQGKAEASATDAGDESATSSIEGGVTDKSGISMDDFTPPGSGACKFIGSLHSYSFSSKHTRERPSVPREPIDRKRLKKDVEPSCSGSSLGPDKGLAQSPPSSSLTATPQKPSQSPSAPPADVTPKPATEAVQSEHSDASPMSINEVILSASGACKLIDSLHSYCFSSRQNKSQVCCLREQVEKKNGELKSLRQRVSRSDSQVRKLQEKLDELRRVSVPYPSSLLSPSREPPKMNPVVEPLSWMLGTWLSDPPGAGTYPTLQPFQYLEEVHISHVGQPMLNFSFNSFHPDTRKPMHRECGFIRLKPDTNKVAFVSAQNTGVVEVEEGEVNGQELCIASHSIARISFAKEPHVEQITRKFRLNSEGKLEQTVSMATTTQPMTQHLHVTYKKVTP

SEQ ID NO: 15779 - protein, 395 aa, Homo sapiens
MPRYCAAICCKNRRGRNNKDRKLSFYPFPLHDKERLEKWLKNMKRDSWVPSKYQFLCSDHFTPDSLDIRWGIRYLKQTAVPTIFSLPEDNQGKDPSKKKSQKKNLEDEKEVCPKAKSEESFVLNETKKNIVNTDVPHQHPELLHSSSLVKPPAPKTGSIQNNMLTLNLVKQHTGKPESTLETSVNQDTGRGGFHTCFENLNSTTITLTTSNSESIHQSLETQEVLEVTTSHLANPNFTSNSMEIKSAQENPFLFSTINQTVEELNTNKESVIAIFVPAENSKPSVNSFISAQKETTEMEDTDIEDSLYKDVDYGTEVLQIEHSYCRQDINKEHLWQKVSKLHSKITLLELKEQQTLGRLKSLEALIRQLKQENWLSEENVKIIENHFTTYEVTMI

SEQ ID NO: 15780 - protein, 222 aa, Homo sapiens
MVKCCSAIGCASRCLPNSKLKGLTFHVFPTDENIKRKWVLAMKRLDVNAAGIWEPKKGDVLCSRHFKKTDFDRSAPNIKLKPGVIPSIFDSPYHLQGKREKLHCRKNFTLKTVPATNYNHHLVGASSCIEEFQSQFIFEHSYSVMDSPKKLKHKLDHVIGELEDTKESLRNVLDREKRFQKSLRKTIRELKDECLISQETANRLDTFCWDCCQESIEQDYIS

SEQ ID NO: 15781 - protein, 309 aa, Homo sapiens
MPRHCSAAGCCTRDTRETRNRGISFHRLPKKDNPRRGLWLANCQRLDPSGQGLWDPASEYIYFCSKHFEEDCFELVGISGYHRLKEGAVPTIFESFSKLRRTTKTKGHSYPPGPAEVSRLRRCRKRCSEGRGPTTPFSPPPPADVTCFPVEEASAPATLPASPAGRLEPGLSSPFSDLLGPLGAQADEAGCSAQPSPERQPSPLEPRPVSPSAYMLRLPPPAGAYIQNEHSYQVGSALLWKRRAEAALDALDKAQRQLQACKRREQRLRLRLTKLQQERAREKRAQADARQTLKEHVQDFAMQLSSSMA

SEQ ID NO: 15782 - protein, 274 aa, Homo sapiens
MPKYCRAPNCSNTAGRLGADNRPVSFYKFPLKDGPRLQAWLQHMGCEHWVPSCHQHLCSEHFTPSCFQWRWGVRYLRPDAVPSIFSRGPPAKSQRRTRSTQKPVSPPPPLQKNTPLPQSPAIPVSGPVRLVVLGPTSGSPKTVATMLLTPLAPAPTPERSQPEVPAQQAQTGLGPVLGALQRRVRRLQRCQERHQAQLQALERLAQQLHGESLLARARRGLQRLTTAQTLGPEESQTFTIICGGPDIAMVLAQDPAPATVDAKPELLDTRIPSA

SEQ ID NO: 15783 - protein, 903 aa, Homo sapiens
MTRSCSAVGCSTRDTVLSRERGLSFHQFPTDTIQRSKWIRAVNRVDPRSKKIWIPGPGAILCSKHFQESDFESYGIRRKLKKGAVPSVSLYKIPQGVHLKGKARQKILKQPLPDNSQEVATEDHNYSLKTPLTIGAEKLAEVQQMLQVSKKRLISVKNYRMIKKRKGLRLIDALVEEKLLSEETECLLRAQFSDFKWELYNWRETDEYSAEMKQFACTLYLCSSKVYDYVRKILKLPHSSILRTWLSKCQPSPGFNSNIFSFLQRRVENGDQLYQYCSLLIKSMPLKQQLQWDPSSHSLQGFMDFGLGKLDADETPLASETVLLMAVGIFGHWRTPLGYFFVNRASGYLQAQLLRLTIGKLSDIGITVLAVTSDATAHSVQMAKALGIHIDGDDMKCTFQHPSSSSQQIAYFFDSCHLLRLIRNAFQNFQSIQFINGIAHWQHLVELVALEEQELSNMERIPSTLANLKNHVLKVNSATQLFSESVASALEYLLSLDLPPFQNCIGTIHFLRLINNLFDIFNSRNCYGKGLKGPLLPETYSKINHVLIEAKTIFVTLSDTSNNQIIKGKQKLGFLGFLLNAESLKWLYQNYVFPKVMPFPYLLTYKFSHDHLELFLKMLRQVLVTSSSPTCMAFQKAYYNLETRYKFQDEVFLSKVSIFDISIARRKDLALWTVQRQYGVSVTKTVFHEEGICQDWSHCSLSEALLDLSDHRRNLICYAGYVANKLSALLTCEDCITALYASDLKASKIGSLLFVKKKNGLHFPSESLCRVINICERVVRTHSRMAIFELVSKQRELYLQQKILCELSGHINLFVDVNKHLFDGEVCAINHFVKLLKDIIICFLNIRAKNVAQNPLKHHSERTDMKTLSRKHWSSVQDYKCSSFANTSSKFRHLLSNDGYPFK

SEQ ID NO: 15784 - protein, 539 aa, Homo sapiens
MGSPEDDLIGIPFPDHSSELLSCLNEQRQLGHLCDLTIRTQGLEYRTHRAVLAACSHYFKKLFTEGGGGAVMGAGGSGTATGGAGAGVCELDFVGPEALGALLEFAYTATLTTSSANMPAVLQAARLLEIPCVIAACMEILQGSGLEAPSPDEDDCERARQYLEAFATATASGVPNGEDSPPQVPLPPPPPPPPRPVARRSRKPRKAFLQTKGARANHLVPEVPTVPAHPLTYEEEEVAGRVGSSGGSGPGDSYSPPTGTASPPEGPQSYEPYEGEEEEEELVYPPAYGLAQGGGPPLSPEELGSDEDAIDPDLMAYLSSLHQDNLAPGLDSQDKLVRKRRSQMPQECPVCHKIIHGAGKLPRHMRTHTGEKPFACEVCGVRFTRNDKLKIHMRKHTGERPYSCPHCPARFLHSYDLKNHMHLHTGDRPYECHLCHKAFAKEDHLQRHLKGQNCLEVRTRRRRKDDAPPHYPPPSTAAASPAGLDLSNGHLDTFRLSLARFWEQSAPTGPPVSTPGPPDDDEEEGAPTTPQAEGAMESS

SEQ ID NO: 15785 - protein, 490 aa, Homo sapiens
MEQKPSKVECGSDPEENSARSPDGKRKRKNGQCSLKTSMSGYIPSYLDKDEQCVVCGDKATGYHYRCITCEGCKGFFRRTIQKNLHPTYSCKYDSCCVIDKITRNQCQLCRFKKCIAVGMAMDLVLDDSKRVAKRKLIEQNRERRRKEEMIRSLQQRPEPTPEEWDLIHIATEAHRSTNAQGSHWKQRRKFLPDDIGQSPIVSMPDGDKVDLEAFSEFTKIITPAITRVVDFAKKLPMFSELPCEDQIILLKGCCMEIMSLRAAVRYDPESDTLTLSGEMAVKREQLKNGGLGVVSDAIFELGKSLSAFNLDDTEVALLQAVLLMSTDRSGLLCVDKIEKSQEAYLLAFEHYVNHRKHNIPHFWPKLLMKEREVQSSILYKGAAAEGRPGGSLGVHPEGQQLLGMHVVQGPQVRQLEQQLGEAGSLQGPVLQHQSPKSPQQRLLELLHRSGILHARAVCGEDDSSEADSPSSSEEEPEVCEDLAGNAASP

SEQ ID NO: 15786 - protein, 461 aa, Homo sapiens
MTPNSMTENGLTAWDKPKHCPDREHDWKLVGMSEACLHRKSHSERRSTLKNEQSSPHLIQTTWTSSIFHLDHDDVNDQSVSSAQTFQTEEKKCKGYIPSYLDKDELCVVCGDKATGYHYRCITCEGCKGFFRRTIQKNLHPSYSCKYEGKCVIDKVTRNQCQECRFKKCIYVGMATDLVLDDSKRLAKRKLIEENREKRRREELQKSIGHKPEPTDEEWELIKTVTEAHVATNAQGSHWKQKRKFLPEDIGQAPIVNAPEGGKVDLEAFSHFTKIITPAITRVVDFAKKLPMFCELPCEDQIILLKGCCMEIMSLRAAVRYDPESETLTLNGEMAVTRGQLKNGGLGVVSDAIFDLGMSLSSFNLDDTEVALLQAVLLMSSDRPGLACVERIEKYQDSFLLAFEHYINYRKHHVTHFWPKLLMKVTDLRMIGACHASRFLHMKVECPTELFPPLFLEVFED

SEQ ID NO: 15787 - protein, 330 aa, Homo sapiens
MEHLGPHHLHPGHAEPISFGIDQILNSPDQGGCMGPASRLQDGEYGLGCLVGGAYTYGGGGSAAATGAGGAGAYGTGGPGGPGGPAGGGGACSMGPLTGSYNVNMALAGGPGPGGGGGSSGGAGALSAAGVIRVPAHRPLAGAVAHPQPLATGLPTVPSVPAMPGVNNLTGLTFPWMESNRRYTKDRFTGHPYQNRTPPKKKKPRTSFTRLQICELEKRFHRQKYLASAERAALAKALKMTDAQVKTWFQNRRTKWRRQTAEEREAERQQANRILLQLQQEAFQKSLAQPLPADPLCVHNSSLFALQNLQPWSDDSTKITSVTSVASACE

SEQ ID NO: 15788 - protein, 284 aa, Homo sapiens
MEPGMLGPHNLPHHEPISFGIDQILSGPETPGGGLGLGRGGQGHGENGAFSGGYHGASGYGPAGSLAPLPGSSGVGPGGVIRVPAHRPLPVPPPAGGAPAVPGPSGLGGAGGLAGLTFPWMDSGRRFAKDRLTAALSPFSGTRRIGHPYQNRTPPKRKKPRTSFSRSQVLELERRFLRQKYLASAERAALAKALRMTDAQVKTWFQNRRTKWRRQTAEEREAERHRAGRLLLHLQQDALPRPLRPPLPPDPLCLHNSSLFALQNLQPWAEDNKVASVSGLASVV

SEQ ID NO: 15789 - protein, 291 aa, Homo sapiens
MEAPASAQTPHPHEPISFGIDQILNSPDQDSAPAPRGPDGASYLGGPPGGRPGATYPSLPASFAGLGAPFEDAGSYSVNLSLAPAGVIRVPAHRPLPGAVPPPLPSALPAMPSVPTVSSLGGLNFPWMESSRRFVKDRFTAAAALTPFTVTRRIGHPYQNRTPPKRKKPRTSFSRVQICELEKRFHRQKYLASAERAALAKSLKMTDAQVKTWFQNRRTKWRRQTAEEREAERQQASRLMLQLQHDAFQKSLNDSIQPDPLCLHNSSLFALQNLQPWEEDSSKVPAVTSLV

SEQ ID NO: 15790 - protein, 510 aa, Homo sapiens
MAADSDDGAVSAPAASDGGVSKSTTSGEELVVQVPVVDVQSNNFKEMWPSLLLAIKTANFVAVDTELSGLGDRKSLLNQCIEERYKAVCHAARTRSILSLGLACFKRQPDKGEHSYLAQVFNLTLLCMEEYVIEPKSVQFLIQHGFNFNQQYAQGIPYHKGNDKGDESQSQSVRTLFLELIRARRPLVLHNGLIDLVFLYQNFYAHLPESLGTFTADLCEMFPAGIYDTKYAAEFHARFVASYLEYAFRKCERENGKQRAAGSPHLTLEFCNYPSSMRDHIDYRCCLPPATHRPHPTSICDNFSAYGWCPLGPQCPQSHDIDLIIDTDEAAAEDKRRRRRRREKRKRALLNLPGTQTSGEAKDGPPKKQVCGDSIKPEETEQEVAADETRNLPHSKQGNKNDLEMGIKAARPEIADRATSEVPGSQASPNPVPGDGLHRAGFDAFMTGYVMAYVEVSQGPQPCSSGPWLPECHNKVYLSGKAVPLTVAKSQFSRSSKAHNQKMKLTWGSS

SEQ ID NO: 15791 - protein, 1378 aa, Homo sapiens
MSLERELRQLSKAKAKAQRAGQRREEAALCHQLGELLAGHGRYAEALEQHWQELQLRERADDPLGCAVAHRKIGERLAEMEDYPAALQHQHQYLELAHSLRNHTELQRAWATIGRTHLDIYDHCQSRDALLQAQAAFEKSLAIVDEELEGTLAQGELNEMRTRLYLNLGLTFESLQQTALCNDYFRKSIFLAEQNHLYEDLFRARYNLGTIHWRAGQHSQAMRCLEGARECAHTMRKRFMESECCVVIAQVLQDLGDFLAAKRALKKAYRLGSQKPVQRAAICQNLQHVLAVVRLQQQLEEAEGRDPQGAMVICEQLGDLFSKAGDFPRAAEAYQKQLRFAELLDRPGAERAIIHVSLATTLGDMKDHHGAVRHYEEELRLRSGNVLEEAKTWLNIALSREEAGDAYELLAPCFQKALSCAQQAQRPQLQRQVLQHLHTVQLRLQPQEAPETETRLRELSVAEDEDEEEEAEEAAATAESEALEAGEVELSEGEDDTDGLTPQLEEDEELQGHLGRRKGSKWNRRNDMGETLLHRACIEGQLRRVQDLVRQGHPLNPRDYCGWTPLHEACNYGHLEIVRFLLDHGAAVDDPGGQGCEGITPLHDALNCGHFEVAELLLERGASVTLRTRKGLSPLETLQQWVKLYRRDLDLETRQKARAMEMLLQAAASGQDPHSSQAFHTPSSLLFDPETSPPLSPCPEPPSNSTRLPEASQAHVRVSPGQAAPAMARPRRSRHGPASSSSSSEGEDSAGPARPSQKRPRCSATAQRVAAWTPGPASNREAATASTSRAAYQAAIRGVGSAQSRLGPGPPRGHSKALAPQAALIPEEECLAGDWLELDMPLTRSRRPRPRGTGDNRRPSSTSGSDSEESRPRARAKQVRLTCMQSCSAPVNAGPSSLASEPPGSPSTPRVSEPSGDSSAAGQPLGPAPPPPIRVRVQVQDHLFLIPVPHSSDTHSVAWLAEQAAQRYYQTCGLLPRLTLRKEGALLAPQDLIPDVLQSNDEVLAEVTSWDLPPLTDRYRRACQSLGQGEHQQVLQAVELQGLGLSFSACSLALDQAQLTPLLRALKLHTALRELRLAGNRLGDKCVAELVAALGTMPSLALLDLSSNHLGPEGLRQLAMGLPGQATLQSLEELDLSMNPLGDGCGQSLASLLHACPLLSTLRLQACGFGPSFFLSHQTALGSAFQDAEHLKTLSLSYNALGAPALARTLQSLPAGTLLHLELSSVAAGKGDSDLMEPVFRYLAKEGCALAHLTLSANHLGDKAVRDLCRCLSLCPSLISLDLSANPEISCASLEELLSTLQKRPQGLSFLGLSGCAVQGPLGLGLWDKIAAQLRELQLCSRRLCAEDRDALRQLQPSRPGPGECTLDHGSKLFFRRL

SEQ ID NO: 15792 - protein, 1045 aa, Homo sapiens
MGSQPPLGSPLSREEGEAPPPAPASEGRRRSRRVRLRGSCRHRPSFLGCRELAASAPARPAPASSEIMASAAKEFKMDNFSPKAGTSKLQQTVPADASPDSKCPICLDRFDNVSYLDRCLHKFCFRCVQEWSKNKAECPLCKQPFDSIFHSVRAEDDFKEYVLRPSYNGSFVTPDRRFRYRTTLTRERNASVYSPSGPVNRRTTTPPDSGVLFEGLGISTRPRDVEIPQFMRQIAVRRPTTADERSLRKIQEQDIINFRRTLYRAGARVRNIEDGGRYRDISAEFFRRNPACLHRLVPWLKRELTVLFGAHGSLVNIVQHIIMSNVTRYDLESQAFVSDLRPFLLNRTEHFIHEFISFARSPFNMAAFDQHANYDCPAPSYEEGSHSDSSVITISPDEAETQELDINVATVSQAPWDDETPGPSYSSSEQVHVTMSSLLNTSDSSDEELVTGGATSQIQGVQTNDDLNNDSDDSSDNCVIVGFVKPLAERTPELVELSSDSEDLGSYEKMETVKTQEQEQSYSSGDSDVSRCSSPHSVLGKDEQINKGHCDSSTRIKSKKEEKRSTSLSSPRNLNSSVRGDRVYSPYNHRHRKRGRSRSSDSRSQSRSGHDQKNHRKHHGKKRMKSKRSRSRESSRPRGRRDKKRSRTRDSSWSRRSQTLSLSSESTSRSRSRSSDHGKRRSRSRNRDRYYLRNNYGSRYKWEYTYYSRNKDRDGYESSYRRRTLSRAHYSRQSSSPEFRVQSFSERTNARKKNNHSERKYYYYERHRSRSLSSNRSRTASTGTDRVRNEKPGGKRKYKTRHLEGTNEVAQPSREFASKAKDSHYQKSSSKLDGNYKNESDTFSDSRSSDRETKHKRRKRKTRSLSVEIVYEGKATDTTKHHKKKKKKHKKKHKKHHGDNASRSPVVITIDSDSDKDSEVKEDTECDNSGPQDPLQNEFLAPSLEPFETKDVVTIEAEFGVLDKECDIATLSNNLNNANKTVDNIPPLAASVEQTLDVREESTFVSDLENQPSNIVSLQTEPSRQLPSPRTSLMSVCLGRDCDMS

SEQ ID NO: 15793 - protein, 526 aa, Homo sapiens
MDVRFYPPPAQPAAAPDAPCLGPSPCLDPYYCNKFDGENMYMSMTEPSQDYVPASQSYPGPSLESEDFNIPPITPPSLPDHSLVHLNEVESGYHSLCHPMNHNGLLPFHPQNMDLPEITVSNMLGQDGTLLSNSISVMPDIRNPEGTQYSSHPQMAAMRPRGQPADIRQQPGMMPHGQLTTINQSQLSAQLGLNMGGSNVPHNSPSPPGSKSATPSPSSSVHEDEGDDTSKINGGEKRPASDMGKKPKTPKKKKKKDPNEPQKPVSAYALFFRDTQAAIKGQNPNATFGEVSKIVASMWDGLGEEQKQVYKKKTEAAKKEYLKQLAAYRASLVSKSYSEPVDVKTSQPPQLINSKPSVFHGPSQAHSALYLSSHYHQQPGMNPHLTAMHPSLPRNIAPKPNNQMPVTVSIANMAVSPPPPLQISPPLHQHLNMQQHQPLTMQQPLGNQLPMQVQSALHSPTMQQGFTLQPDYQTIINPTSTAAQVVTQAMEYVRSGCRNPPPQPVDWNNDYCSSGGMQRDKALYLT

SEQ ID NO: 15794 - protein, 488 aa, Homo sapiens
MQQTRTEAVAGAFSRCLGFCGMRLGLLLLARHWCIAGVFPQKFDGDSAYVGMSDGNPELLSTSQTYNGQSENNEDYEIPPITPPNLPEPSLLHLGDHEASYHSLCHGLTPNGLLPAYSYQAMDLPAIMVSNMLAQDSHLLSGQLPTIQEMVHSEVAAYDSGRPGPLLGRPAMLASHMSALSQSQLISQMGIRSSIAHSSPSPPGSKSATPSPSSSTQEEESEVHFKISGEKRPSADPGKKAKNPKKKKKKDPNEPQKPVSAYALFFRDTQAAIKGQNPSATFGDVSKIVASMWDSLGEEQKQSSPDQGETKSTQANPPAKMLPPKQPMYAMPGLASFLTPSDLQAFRSGASPASLARTLGSKSLLPGLSASPPPPPSFPLSPTLHQQLSLPPHAQGALLSPPVSMSPAPQPPVLPTPMALQVQLAMSPSPPGPQDFPHISEFPSSSGSCSPGPSNPTSSGDWDSSYPSGECGISTCSLLPRDKSLYLT

SEQ ID NO: 15795 - protein, 576 aa, Homo sapiens
MDVRFYPAAAGDPASLDFAQCLGYYGYSKFGNNNNYMNMAEANNAFFAASEQTFHTPSLGDEEFEIPPITPPPESDPALGMPDVLLPFQALSDPLPSQGSEFTPQFPPQSLDLPSITISRNLVEQDGVLHSSGLHMDQSHTQVSQYRQDPSLIMRSIVHMTDAARSGVMPPAQLTTINQSQLSAQLGLNLGGASMPHTSPSPPASKSATPSPSSSINEEDADEANRAIGEKRAAPDSGKKPKTPKKKKKKDPNEPQKPVSAYALFFRDTQAAIKGQNPNATFGEVSKIVASMWDSLGEEQKQVYKRKTEAAKKEYLKALAAYRASLVSKAAAESAEAQTIRSVQQTLASTNLTSSLLLNTPLSQHGTVSASPQTLQQSLPRSIAPKPLTMRLPMNQIVTSVTIAANMPSNIGAPLISSMGTTMVGSAPSTQVSPSVQTQQHQMQLQQQQQQQQQQMQQMQQQQLQQHQMHQQIQQQMQQQHFQHHMQQHLQQQQQHLQQQINQQQLQQQLQQRLQLQQLQHMQHQSQPSPRQHSPVASQITSPIPAIGSPQPASQQHQSQIQSQTQTQVLSQVSIF

SEQ ID NO: 15796 - protein, 621 aa, Homo sapiens
MEFPGGNDNYLTITGPSHPFLSGAETFHTPSLGDEEFEIPPISLDSDPSLAVSDVVGHFDDLADPSSSQDGSFSAQYGVQTLDMPVGMTHGLMEQGGGLLSGGLTMDLDHSIGTQYSANPPVTIDVPMTDMTSGLMGHSQLTTIDQSELSSQLGLSLGGGTILPPAQSPEDRLSTTPSPTSSLHEDGVEDFRRQLPSQKTVVVEAGKKQKAPKKRKKKDPNEPQKPVSAYALFFRDTQAAIKGQNPNATFGEVSKIVASMWDSLGEEQKQVYKRKTEAAKKEYLKALAAYKDNQECQATVETVELDPAPPSQTPSPPPMATVDPASPAPASIEPPALSPSIVVNSTLSSYVANQASSGAGGQPNITKLIITKQMLPSSITMSQGGMVTVIPATVVTSRGLQLGQTSTATIQPSQQAQIVTRSVLQAAAAAAAAASMQLPPPRLQPPPLQQMPQPPTQQQVTILQQPPPLQAMQQPPPQKVRINLQQQPPPLQIKSVPLPTLKMQTTLVPPTVESSPERPMNNSPEAHTVEAPSPETICEMITDVVPEVESPSQMDVELVSGSPVALSPQPRCVRSGCENPPIVSKDWDNEYCSNECVVKHCRDVFLAWVASRNSNTVVFVK

SEQ ID NO: 15797 - protein, 393 aa, Homo sapiens [sequence omitted]

SEQ ID NO: 15798 - protein, 680 aa, Homo sapiens
MNFETSRCATLQYCPDPYIQRFVETPAHFSWKESYYRSTMSQSTQTNEFLSPEVFQHIWDFLEQPICSVQPIDLNFVDEPSEDGATNKIEISMDCIRMQDSDLSDPMWPQYTNLGLLNSMDQQIQNGSSSTSPYNTDHAQNSVTAPSPYAQPSSTFDALSPSPAIPSNTDYPGPHSFDVSFQQSSTAKSATWTYSTELKKLYCQIAKTCPIQIKVMTPPPQGAVIRAMPVYKKAEHVTEVVKRCPNHELSREFNEGQIAPPSHLIRVEGNSHAQYVEDPITGRQSVLVPYEPPQVGTEFTTVLYNFMCNSSCVGGMNRRPILIIVTLETRDGQVLGRRCFEARICACPGRDRKADEDSIRKQQVSDSTKNGDGTKRPFRQNTHGIQMTSIKKRRSPDDELLYLPVRGRETYEMLLKIKESLELMQYLPQHTIETYRQQQQQQHQHLLQKQTSIQSPSSYGNSSPPLNKMNSMNKLPSVSQLINPQQRNALTPTTIPDGMGANIPMMGTHMPMAGDMNGLSPTQALPPPLSMPSTSHCTPPPPYPTDCSIVSFLARLGCSSCLDYFTTQGLTTIYQIEHYSMDDLASLKIPEQFRHAIWKGILDHRQLHEFSSPSHLLRTPSSASTVSVGSSETRGERVIDAVRFTLRQTISFPPRDEWNDFNFDMDARRNKQQRIKEEGE

SEQ ID NO: 15799 - protein, 636 aa, Homo sapiens
MAQSTATSPDGGTTFEHLWSSLEPDSTYFDLPQSSRGNNEVVGGTDSSMDVFHLEGMTTSVMAQFNLLSSTMDQMSSRAASASPYTPEHAASVPTHSPYAQPSSTFDTMSPAPVIPSNTDYPGPHHFEVTFQQSSTAKSATWTYSPLLKKLYCQIAKTCPIQIKVSTPPPPGTAIRAMPVYKKAEHVTDVVKRCPNHELGRDFNEGQSAPASHLIRVEGNNLSQYVDDPVTGRQSVVVPYEPPQVGTEFTTILYNFMCNSSCVGGMNRRPILIIITLEMRDGQVLGRRSFEGRICACPGRDRKADEDHYREQQALNESSAKNGAASKRAFKQSPPAVPALGAGVKKRRHGDEDTYYLQVRGRENFEILMKLKESLELMELVPQPLVDSYRQQQQLLQRPSHLQPPSYGPVLSPMNKVHGGMNKLPSVNQLVGQPPPHSSAATPNLGPVGPGMLNNHGHAVPANGEMSSSHSAQSMVSGSHCTPPPPYHADPSLVSFLTGLGCPNCIEYFTSQGLQSIYHLQNLTIEDLGALKIPEQYRMTIWRGLQDLKQGHDYSTAQQLLRSSNAATISIGGSGELQRQRVMEAVHFRVRHTITIPNRGGPGGGPDEWADFGFDLPDCKARKQPIKEEFTEAEIH

SEQ ID NO: 15800 - protein, 411 aa, Homo sapiens
MLSLREQQLQVWFKNRRAKLARERRLQQQPQRVPGQRGRGARAAPLVPAASASAPQRGPSGILPAAEPTICSLHQAWGGPGCRAQKGIPAALSPGPGPIPAPIPGPAQIPGPLPGSIPGPIPGPAQIPSPIPAPIPGPISGPVQIPGPFRGPIPGPISGPAPIPGPISGPFSGPNPGPIPGPNPGPIPGPISGPIPGPISVPIPGPIPGPISGPISGPNPGPIPGPIPGPISGPNPGPIPGPISGPNPGLIPGPIPGPISGPGPIIGPIPSPAQIPGPGRLQGPGPILSPGRMRSPGSLPGLAPILGPGSGPGSGSVPAPIPGPGSLPAPAPLWPQSPDASDFLPDTQLFPHFTELLLPLDPLEGSSVSTMTSQYQEGDDSMGKKHSGSQPQEEGGSVNENHSGPRLLLDL

SEQ ID NO: 15801 - protein, 258 aa, Homo sapiens
MTHDKSWRRCSISGSTKCRCGSRIAGPNALGSGGSRSSSSSSRSILSSSILSSSIPSSSSSSSSPSSSHSSSSPSSSHSSSSPSSSSSTSSPSSSSSSSSSSSPSSSNSSSSSSSSSPSSSSSSSSSSPSSSSSSPSSSSSSSSSSPSSSSSSPSSSSSSSSSSSSSPSSSSPSSSGSSPSSSNSSPSSSSSSPSSSSSSPSPRSSSPSSSSSSTSSPSTSSPSSSSPSSSSPSSSCPSAALGRRPQSPQSSHCAPFP

SEQ ID NO: 15802 - protein, 1200 aa, Homo sapiens
MGDQQLYKTNHVAHGSENLFYQQPPLGVHSGLNHNYGNAVTGGGMDAPQASPISPHFPQDTRDGLGLPVGSKNLGQMDTSRQGGWGSHAGPGNHVQLRGNLANSNMMWGAPAQAEPTDGYQYTYSQASEIRTQKLTSGVLHKLDSFTQVFANQNLRIQVNNMAQVLHTQSAVMDGAPDSALRQLLSQKPMEPPAPAIPSRYQQVPQQPHPGFTGGLSKPALQVGQHPTQGHLYYDYQQPLAQVPVQGGQPLQAPQMLSQHMQQMQQHQYYPPQQQQQAGQQRISMQEIQTQPQQIRPSQPQPPPQQQQPQQLQLQQRQGSMQIPQYYQPQPMMQHLQEQQQQQMHLQPPSYHRDPHQYTPEQAHTVQLIPLGSMSQYYYQEPQQPYSHPLYQQSHLSQHQQREDSQLKTYSSDRQAQAMLSSHGDLGPPDTGMGDPASSDLTRVSSTLPHRPLLSPSGIHLNNMGPQHQQLSPSAMWPQMHLPDGRAQPGSPESSGQPKGAFGEQFDAKNKLTCSICLKEFKNLPALNGHMRSHGGMRASPNLKQEEGEKVLPPQPQPPLPPPPPPPPPPQLPPEAESLTPMVMPVSVPVKLLPPKPSSQGFTNSTVAAPSARDKPASSMSDDEMPVLEIPRKHQPSVPKAEEPLKTVQEKKKFRHRPEPLFIPPPPSYNPNPAASYSGATLYQSQLRSPRVLGDHLLLDPTHELPPYTPPPMLSPVRQGSGLFSNVLISGHGPGAHPQLPLTPLTPTPRVLLCRSNSIDGSNVTVTPGPGEQTVDVEPRINIGLRFQAEIPELQDISALAQDTHKATLVWKPWPELENHDLQQRVENLLNLCCSSALPGGGTNSEFALHSLFEAKGDVMVALEMLLLRKPVRLKCHPLANYHYAGSDKWTSLERKLFNKALATYSKDFIFVQKMVKSKTVAQCVEYYYTWKKIMRLGRKHRTRLAEIIDDCVTSEEEEELEEEEEEDPEEDRKSTKEEESEVPKSPEPPPVPVLAPTEGPPLQALGQPSGSFICEMPNCGAVFSSRQALNGHARIHGGTNQVTKARGAIPSGKQKPGGTQSGYCSVKSSPSHSTTSGETDPTTIFPCKECGKVFFKIKSRNAHMKTHRQQEEQQRQKAQKAAFAAEMAATIERTTGPVGAPGLLPLDQLSLIKPIKDVDILDDDVVQQLGGVMEEAEVVDTDLLLDDQDSVLLQGDAEL

SEQ ID NO: 15803 - protein, 1281 aa, Homo sapiens
MVRKKNPPLRNVASEGEGQILEPIGTESKVSGKNKEFSADQMSENTDQSDAAELNHKEEHSLHVQDPSSSSKKDLKSAVLSEKAGFNYESPSKGGNFPSFPHDEVTDRNMLAFSSPAAGGVCEPLKSPQRAEADDPQDMACTPSGDSLETKEDQKMSPKATEETGQAQSGQANCQGLSPVSVASKNPQVPSDGGVRLNKSKTDLLVNDNPDPAPLSPELQDFKCNICGYGYYGNDPTDLIKHFRKYHLGLHNRTRQDAELDSKILALHNMVQFSHSKDFQKVNRSVFSGVLQDINSSRPVLLNGTYDVQVTSGGTFIGIGRKTPDCQGNTKYFRCKFCNFTYMGNSSTELEQHFLQTHPNKIKASLPSSEVAKPSEKNSNKSIPALQSSDSGDLGKWQDKITVKAGDDTPVGYSVPIKPLDSSRQNGTEATSYYWCKFCSFSCESSSSLKLLEHYGKQHGAVQSGGLNPELNDKLSRGSVINQNDLAKSSEGETMTKTDKSSSGAKKKDFSSKGAEDNMVTSYNCQFCDFRYSKSHGPDVIVVGPLLRHYQQLHNIHKCTIKHCPFCPRGLCSPEKHLGEITYPFACRKSNCSHCALLLLHLSPGAAGSSRVKHQCHQCSFTTPDVDVLLFHYESVHESQASDVKQEANHLQGSDGQQSVKESKEHSCTKCDFITQVEEEISRHYRRAHSCYKCRQCSFTAADTQSLLEHFNTVHCQEQDITTANGEEDGHAISTIKEEPKIDFRVYNLLTPDSKMGEPVSESVVKREKLEEKDGLKEKVWTESSSDDLRNVTWRGADILRGSPSYTQASLGLLTPVSGTQEQTKTLRDSPNVEAAHLARPIYGLAVETKGFLQGAPAGGEKSGALPQQYPASGENKSKDESQSLLRRRRGSGVFCANCLTTKTSLWRKNANGGYVCNACGLYQKLHSTPRPLNIIKQNNGEQIIRRRTRKRLNPEALQAEQLNKQQRGSNEEQVNGSPLERRSEDHLTESHQREIPLPSLSKYEAQGSLTKSHSAQQPVLVSQTLDIHKRMQPLHIQIKSPQESTGDPGNSSSVSEGKGSSERGSPIEKYMRPAKHPNYSPPGSPIEKYQYPLFGLPFVHNDFQSEADWLRFWSKYKLSVPGNPHYLSHVPGLPNPCQNYVPYPTFNLPPHFSAVGSDNDIPLDLAIKHSRPGPTANGASKEKTKAPPNVKNEGPLNVVKTEKVDRSTQDELSTKCVHCGIVFLDEVMYALHMSCHGDSGPFQCSICQHLCTDKYDFTTHIQRGLHRNNAQVEKNGKPKE

SEQ ID NO: 15804 - protein, 1073 aa, Homo sapiens
MHQPPESTAAAAAAADISARKMAHPAMFPRRGSGSGSASALNAAGTGVGSNATSSEDFPPPSLLQPPPPAASSTSGPQPPPPQSLNLLSQAQLQAQPLAPGGTQMKKKSGFQITSVTPAQISASISSNNSIAEDTESYDDLDESHTEDLSSSEILDVSLSRATDLGEPERSSSEETLNNFQEAETPGAVSPNQPHLPQPHLPHLPQQNVVINGNAHPHHLHHHHQIHHGHHLQHGHHHPSHVAVASASITGGPPSSPVSRKLSTTGSSDSITPVAPTSAVSSSGSPASVMTNMRAPSTTGGIGINSVTGTSTVNNVNITAVGSFNPNVTSSMLGNVNISTSNIPSAAGVSVGPGVTSGVNVNILSGMGNGTISSSAAVSSVPNAAAGMTGGSVSSQQQQPTVNTSRFRVVKLDSSSEPFKKGRWTCTEFYEKENAVPATEGVLINKVVETVKQNPIEVTSERESTSGSSVSSSVSTLSHYTESVGSGEMGAPTVVVQQQQQQQQQQQQQPALQGVTLQQMDFGSTGPQSIPAVSIPQSISQSQISQVQLQSQELSYQQKQGLQPVPLQATMSAATGIQPSPVNVVGVTSALGQQPSISSLAQPQLPYSQAAPPVQTPLPGAPPPQQLQYGQQQPMVSTQMAPGHVKSVTQNPASEYVQQQPILQTAMSSGQPSSAGVGAGTTVIPVAQPQGIQLPVQPTAVPAQPAGASVQPVGQAPAAVSAVPTGSQIANIGQQANIPTAVQQPSTQVPPSVIQQGAPPSSQVVPPAQTGIIHQGVQTSAPSLPQQLVIASQSSLLTVPPQPQGVEPVAQGIVSQQLPAVSSLPSASSISVTSQVSSTGPSGMPSAPTNLVPPQNIAQTPATQNGNLVQSVSQPPLIATNTNLPLAQQIPLSSTQFSAQSLAQAIGSQIEDARRAAEPSLVGLPQTISGDSGGMSAVSDGSSSSLAASASLFPLKVLPLTTPLVDGEDESSSGASVVAIDNKIEQAMDLVKSHLMYAVREEVEVLKEQIKELIEKNSQLEQENNLLKTLASPEQLAQFQAQLQTGSPPATTQPQGTTQPPAQPASQGSGPTA

SEQ ID NO: 15805 - protein, 780 aa, Homo sapiens
MSKMPAKKKSCFQITSVTTAQVATSITEDTESLDDPDESRTEDVSSEIFDVSRATDYGPEEVCERSSSEETLNNVGDAETPGTVSPNLLLDGQLAAAAAAPANGGGVVSARSVSGALASTLAAAATSAPAPGAPGGPQLAGSSAGPVTAAPSQPPTTCSSRFRVIKLDHGSGEPYRRGRWTCMEYYERDSDSSVLTRSGDCIRHSSTFDQTAERDSGLGATGGSVVVVVASMQGAHGPESGTDSSLTAVSQLPPSEKMSQPTPAQPQSFSVGQPQPPPPPVGGAVAQSSAPLPPFPGAATGPQPMMAAAQPSQPQGAGPGGQTLPPTNVTLAQPAMSLPPQPGPAVGAPAAQQPQQFAYPQPQIPPGHLLPVQPSGQSEYLQQHVAGLQPPSPAQPSSTGAAASPATAATLPVGTGQNASSVGAQLMGASSQPSEAMAPRTGPAQGGQVAPCQPTGVPPATVGGVVQPCLGPAGAGQPQSVPPPQMGGSGPLSAVPGGPHAVVPGVPNVPAAVPAPSVPSVSTTSVTMPNVPAPLAQSQQLSSHTPVSRSSSIIQHVGLPLAPGTHSAPTSLPQSDLSQFQTQTQPLVGQVDDTRRKSEPLPQPPLSLIAENKPVVKPPVADSLANPLQLTPMNSLATSVFSIAIPVDGDEDRNPSTAFYQAFHLNTLKESKSLWDSASGGGVVAIDNKIEQAMDLVKSHLMYAVREEVEVLKEQIKELVERNSLLERENALLKSLSSNDQLSQLPTQQANPGSTSQQQAVIAQPPQPTQPPQQPNVSSA

SEQ ID NO: 15806 - protein, 134 aa, Homo sapiens
MNTEMYQTPMEVAVYQLHNFSISFFSSLLGGDVVSVKLDNSASGASVVAIDNKIEQAMDLVKNHLMYAVREEVEILKEQIRELVEKNSQLERENTLLKTLASPEQLEKFQSCLSPEEPAPESPQVPEAPGGSAV

SEQ ID NO: 15807 - protein, 395 aa, Homo sapiens; identical to SEQ ID NO: 13764

SEQ ID NO: 15808 - protein, 1077 aa, Homo sapiens
MPRRKQQAPRRSAAYVPEEELKAAEIDEEHVEDDGLSLDIQESEYMCNEETEIKEAQSYQNSPVSSATNQDAGYGSPFSESSDQLAHFKGSSSREEKEDPQCPDSVSYPQDSLAQIKAVYANLFSESCWSSLALDLKKSGSTTSTNDASQKESSAPTPTPPTCPVSTTGPTTSTPSTSCSSSTSHSSTTSTSSSSGYDWHQAALAKTLQQTSSYGLLPEPSLFSTVQLYRQNNKLYGSVFTGASKFRCKDCSAAYDTLVELTVHMNETGHYRDDNRDKDSEKTKRWSKPRKRSLMEMEGKEDAQKVLKCMYCGHSFESLQDLSVHMIKTKHYQKVPLKEPVPAITKLVPSTKKRALQDLAPPCSPEPAGMAAEVALSESAKDQKAANPYVTPNNRYGYQNGASYTWQFEARKAQILKCMECGSSHDTLQQLTAHMMVTGHFLKVTTSASKKGKQLVLDPVVEEKIQSIPLPPTTHTRLPASSIKKQPDSPAGSTTSEEKKEPEKEKPPVAGDAEKIKEESEDSLEKFEPSTLYPYLREEDLDDSPKGGLDILKSLENTVSTAISKAQNGAPSWGGYPSIHAAYQLPGTVKPLPAAVQSVQVQPSYAGGVKSLSSAEHNALLHSPGSLTPPPHKSNVSAMEELVEKVTGKVNIKKEERPPEKEKSSLAKAASPIAKENKDFPKTEEVSGKPQKKGPEAETGKAKKEGPLDVHTPNGTEPLKAKVTNGCNNLGIIMDHSPEPSFINPLSALQSIMNTHLGKVSKPVSPSLDPLAMLYKISNSMLDKPVYPATPVKQADAIDRYYYENSDQPIDLTKSKNKPLVSSVADSVASPLRESALMDISDMVKNLTGRLTPKSSTPSTVSEKSDADGSSFEEALDELSPVHKRKGRQSNWNPQHLLILQAQFASSLRETTEGKYIMSDLGPQERVHISKFTGLSMTTISHWLANVKYQLRRTGGTKFLKNLDTGHPVFFCNDCASQFRTASTYISHLETHLGFSLKDLSKLPLNQIQEQQNVSKVLTNKTLGPLGATEEDLGSTFQCKLCNRTFASKHAVKLHLSKTHGKSPEDHLIYVTELEKQ

SEQ ID NO: 15809 - protein, 1034 aa, Homo sapiens
MPRRKQQAPKRAAGYAQEEQLKEEEEIKEEEEEEDSGSVAQLQGGNDTGTDEELETGPEQKGCFSYQNSPGSHLSNQDAENESLLSDASDQVSDIKSVCGRDASDKKAHTHVRLPNEAHNCMDKMTAVYANILSDSYWSGLGLGFKLSNSERRNCDTRNGSNKSDFDWHQDALSKSLQQNLPSRSVSKPSLFSSVQLYRQSSKMCGTVFTGASRFRCRQCSAAYDTLVELTVHMNETGHYQDDNRKKDKLRPTSYSKPRKRAFQDMDKEDAQKVLKCMFCGDSFDSLQDLSVHMIKTKHYQKVPLKEPVPTISSKMVTPAKKRVFDVNRPCSPDSTTGSFADSFSSQKNANLQLSSNNRYGYQNGASYTWQFEACKSQILKCMECGSSHDTLQQLTTHMMVTGHFLKVTSSASKKGKQLVLDPLAVEKMQSLSEAPNSDSLAPKPSSNSASDCTASTTELKKESKKERPEETSKDEKVVKSEDYEDPLQKPLDPTIKYQYLREEDLEDGSKGGGDILKSLENTVTTAINKAQNGAPSWSAYPSIHAAYQLSEGTKPPLPMGSQVLQIRPNLTNKLRPIAPKWKVMPLVSMPTHLAPYTQVKKESEDKDEAVKECGKESPHEEASSFSHSEGDSFRKSETPPEAKKTELGPLKEEEKLMKEGSEKEKPQPLEPTSALSNGCALANHAPALPCINPLSALQSVLNNHLGKATEPLRSPSCSSPSSSTISMFHKSNLNVMDKPVLSPASTRSASVSRRYLFENSDQPIDLTKSKSKKAESSQAQSCMSPPQKHALSDIADMVKVLPKATTPKPASSSRVPPMKLEMDVRRFEDVSSEVSTLHKRKGRQSNWNPQHLLILQAQFASSLFQTSEGKYLLSDLGPQERMQISKFTGLSMTTISHWLANVKYQLRKTGGTKFLKNMDKGHPIFYCSDCASQFRTPSTYISHLESHLGFQMKDMTRLSVDQQSKVEQEISRVSSAQRSPETIAAEEDTDSKFKCKLCCRTFVSKHAVKLHLSKTHSKSPEHHSQFVTDVDEE

SEQ ID NO: 15810 - protein, 1081 aa, Homo sapiens
MPRRKQQAPRRAAAYVSEELKAAALVDEGLDPEEHTADGEPSAKYMCPEKELARACPSYQNSPAAEFSCHEMDSESHISETSDRMADFESGSIKNEEETKEVTVPLEDTTVSDSLEQMKAVYNNFLSNSYWSNLNLNLHQPSSEKNNGSSSSSSSSSSSCGSGSFDWHQSAMAKTLQQVSQSRMLPEPSLFSTVQLYRQSSKLYGSIFTGASKFRCKDCSAAYDTLVELTVHMNETGHYRDDNHETDNNNPKRWSKPRKRSLLEMEGKEDAQKVLKCMYCGHSFESLQDLSVHMIKTKHYQKVPLKEPVTPVAAKIIPATRKKASLELELPSSPDSTGGTPKATISDTNDALQKNSNPYITPNNRYGHQNGASYAWHFEARKSQILKCMECGSSHDTLQELTAHMMVTGHFIKVTNSAMKKGKPIVETPVTPTITTLLDEKVQSVPLAATTFTSPSNTPASISPKLNVEVKKEVDKEKAVTDEKPKQKDKPGEEEEKCDISSKYHYLTENDLEESPKGGLDILKSLENTVTSAINKAQNGTPSWGGYPSIHAAYQLPNMMKLSLGSSGKSTPLKPMFGNSEIVSPTKNQTLVSPPSSQTSPMPKTNFHAMEELVKKVTEKVAKVEEKMKEPDGKLSPPKRATPSPCSSEVGEPIKMEASSDGGFRSQENSPSPPRDGCKDGSPLAEPVENGKELVKPLASSLSGSTAIITDHPPEQPFVNPLSALQSVMNIHLGKAAKPSLPALDPMSMLFKMSNSLAEKAAVATPPPLQSKKADHLDRYFYHVNNDQPIDLTKGKSDKGCSLGSVLLSPTSTAPATSSSTVTTAKTSAVVSFMSNSPLRENALSDISDMLKNLTESHTSKSSTPSSISEKSDIDGATLEEAEESTPAQKRKGRQSNWNPQHLLILQAQFAASLRQTSEGKYIMSDLSPQERMHISRFTGLSMTTISHWLANVKYQLRRTGGTKFLKNLDTGHPVFFCNDCASQIRTPSTYISHLESHLGFRLRDLSKLSTEQINSQIAQTKSPSEKMVTSSPEEDLGTSYQCKLCNRTFASKHAVKLHLSKTHGKSPEDHLLYVSELEKQ

SEQ ID NO: 15811 - protein, 371 aa, Homo sapiens; identical to SEQ ID NO: 15392

SEQ ID NO: 15812 - protein, 905 aa, Homo sapiens
MEGESSRFEIHTPVSDKKKKKCSIHKERPQKHSHEIFRDSSLVNEQSQITRRKKRKKDFQHLISSPLKKSRICDETANATSTLKKRKKRRYSALEVDEEAGVTVVLVDKENINNTPKHFRKDVDVVCVDMSIEQKLPRKPKTDKFQVLAKSHAHKSEALHSKVREKKNKKHQRKAASWESQRARDTLPQSESHQEESWLSVGPGGEITELPASAHKNKSKKKKKKSSNREYETLAMPEGSQAGREAGTDMQESQPTVGLDDETPQLLGPTHKKKSKKKKKKKSNHQEFEALAMPEGSQVGSEVGADMQESRPAVGLHGETAGIPAPAYKNKSKKKKKKSNHQEFEAVAMPESLESAYPEGSQVGSEVGTVEGSTALKGFKESNSTKKKSKKRKLTSVKRARVSGDDFSVPSKNSESTLFDSVEGDGAMMEEGVKSRPRQKKTQACLASKHVQEAPRLEPANEEHNVETAEDSEIRYLSADSGDADDSDADLGSAVKQLQEFIPNIKDRATSTIKRMYRDDLERFKEFKAQGVAIKFGKFSVKENKQLEKNVEDFLALTGIESADKLLYTDRYPEEKSVITNLKRRYSFRLHIGRNIARPWKLIYYRAKKMFDVNNYKGRYSEGDTEKLKMYHSLLGNDWKTIGEMVARSSLSVALKFSQISSQRNRGAWSKSETRKLIKAVEEVILKKMSPQELKEVDSKLQENPESCLSIVREKLYKGISWVEVEAKVQTRNWMQCKSKWTEILTKRMTNGRRIYYGMNALRAKVSLIERLYEINVEDTNEIDWEDLASAIGDVPPSYVQTKFSRLKAVYVPFWQKKTFPEIIDYLYETTLPLLKEKLEKMMEKKGTKIQTPAAPKQVFPFRDIFYYEDDSEGEDIEKESEGQAPCMAHACNSSTLGGQGRWII

SEQ ID NO: 15813 - protein, 373 aa, Homo sapiens; identical to SEQ ID NO: 14989

SEQ ID NO: 15814 - protein, 1162 aa, Homo sapiens
MEEVRCPEHGTFCFLKTGVRDGPNKGKSFYVCRADTCSFVRATDIPVSHCLLHEDFVVELQGLLLPQDKKEYRLFFRCIRSKAEGKRWCGSIPWQDPDSKEHSVSNKSQHASETFHHSSNWLRNPFKVLDKNQEPALWKQLIKGEGEEKKADKKQREKGDQLFDQKKEQKPEMMEKDLSSGLVPKKKQSVVQEKKQEEGAEIQCEAETGGTHKRDFSEIKSQQCQGNELTRPSASSQEKSSGKSQDVQRESEPLREKVTQLLPQNVHSHNSISKPQKGGPLNKEYTNWEAKETKAKDGPSIQATQKSLPQGHFQERPETHSVPAPGGPAAQAAPAAPGLSLGEGREAATSSDDEEEDDVVFVSSKPGSPLLFDSTLDLETKENLQFPDRSVQRKVSPASGVSKKVEPSDPVARRVYLTTQLKQKKSTLASVNIQALPDKGQKLIKQIQELEEVLSGLTLSPEQGTNEKSNSQVPQQSHFTKTTTGPPHLVPPQPLPRRGTQPVGSLELKSACQVTAGGSSQCYRGHTNQDHVHAVWKITSEAIGQLHRSLESCPGETVVAEDPAGLKVPLLLHQKQALAWLLWRESQKPQGGILADDMGLGKTLTMIALILTQKNQEKKEEKEKSTALTWLSKDDSCDFTSHGTLIICPASLIHHWKNEVEKRVNSNKLRVYLYHGPNRDSRARVLSTYDIVITTYSLVAKEIPTNKQEAEIPGANLNVEGTSTPLLRIAWARIILDEAHNVKNPRVQTSIAVCKLQACARWAVTGTPIQNNLLDMYSLLKFLRCSPFDEFNLWRSQVDNGSKKGGERLSILTKSLLLRRTKDQLDSTGRPLVILPQRKFQLHHLKLSEDEETVYNVFFARSRSALQSYLKRHESRGNQSGRSPNNPFSRVALEFGSEEPRHSEAADSPRSSTVHILSQLLRLRQCCCHLSLLKSALDPMELKGEGLVLSLEEQLSALTLSELRDSEPSSTVSLNGTFFKMELFEGMRESTKISSLLAELEAIQRNSASQKSVIVSQWTNMLKVVALHLKKHGLTYATIDGSVNPKQRMDLVEAFNHSRGPQVMLISLLAGGVGLNLTGGNHLFLLDMHWNPSLEDQACDRIYRVGQQKDVVIHRFVCEGTVEEKILQLQEKKKDLAKQVLSGSGESVTKLTLADLRVLFGI

SEQ ID NO: 15815 - protein, 506 aa, Homo sapiens
MTSKPHSDWIPYSVLDDEGRNLRQQKLDRQRALLEQKQKKKRQEPLMVQANADGRPRSRRARQSEEQAPLVESYLSSSGSTSYQVQEADSLASVQLGATRPTAPASAKRTKAAATAGGQGGAARKEKKGKHKGTSGPAALAEDKSEAQGPVQILTVGQSDHAQDAGETAAGGGERPSGQDLRATMQRKGISSSMSFDEDEEDEEENSSSSSQLNSNTRPSSATSRKSVREAASAPSPTAPEQPVDVEVQDLEEFALRPAPQGITIKCRITRDKKGMDRGMYPTYFLHLDREDGKKVFLLAGRKRKKSKTSNYLISVDPTDLSRGGDSYIGKLRSNLMGTKFTVYDNGVNPQKASSSTLESGTLRQELAAVCYETNVLGFKGPRKMSVIVPGMNMVHERVSIRPRNEHETLLARWQNKNTESIIELQNKTPVWNDDTQSYVLNFHGRVTQASVKNFQIIHGNDPDYIVMQFGRVAEDVFTMDYNYPLCALQAFAIALSSFDSKLACE

SEQ ID NO: 15816 - protein, 202 aa, Homo sapiens
MMQDVSSSPVSPADDSLSNSEEEPDRQQPPSGKRGGRKRRSSRRSAGGGAGPGGAAGGGVGGGDEPGSPAQGKRGKKSAGCGGGGGAGGGGGSSSGGGSPQSYEELQTQRVMANVRERQRTQSLNEAFAALRKIIPTLPSDKLSKIQTLKLAARYIDFLYQVLQSDELDSKMASCSYVAHERLSYAFSVWRMEGAWSMSASH

SEQ ID NO: 15817 - protein, 160 aa, Homo sapiens
MEEGSSSPVSPVDSLGTSEEELERQPKRFGRKRRYSKKSSEDGSPTPGKRGKKGSPSAQSFEELQSQRILANVRERQRTQSLNEAFAALRKIIPTLPSDKLSKIQTLKLAARYIDFLYQVLQSDEMDNKMTSCSYVAHERLSYAFSVWRMEGAWSMSASH

SEQ ID NO: 15818 - protein, 540 aa, Homo sapiens
MAWVLKMDEVIESGLVHDFDASLSGIGQELGAGAYSMSDVLALPIFKQEDSSLPLDGETEHPPFQYVMCAATSPAVKLHDETLTYLNQGQSYEIRMLDNRKMGDMPEINGKLVKSIIRVVFHDRRLQYTEHQQLEGWKWNRPGDRLLDLDIPMSVGIIDTRTNPSQLNAVEFLWDPAKRTSAFIQVHCISTEFTPRKHGGEKGVPFRIQVDTFKQNENGEYTDHLHSASCQIKVFKPKGADRKQKTDREKMEKRTAHEKEKYQPSYDTTILTEMRLEPIIEDAVEHEQKKSSKRTLPADYGDSLAKRGSCSPWPDAPTAYVNNSPSPAPTFTSPQQSTCSVPDSNSSSPNHQGDGASQTSGEQIQPSATIQETQQWLLKNRFSSYTRLFSNFSGADLLKLTKEDLVQICGAADGIRLYNSLKSRSVRPRLTIYVCREQPSSTVLQGQQQAASSASENGSGAPYVYHAIYLEEMIASEVARKLALVFNIPLHQINQVYRQGPTGIHILVSDQMVQNFQDESCFLFSTVKAESSDGIHIILK

SEQ ID NO: 15819 - protein, 764 aa, Homo sapiens
MNGEADCPTDLEMAAPKGQDRWSQEDMLTLLECMKNNLPSNDSSKFKTTESHMDWEKVAFKDFSGDMCKLKWVEISNEVRKFRTLTELILDAQEHVKNPYKGKKLKKHPDFPKKPLTPYFRFFMEKRAKYAKLHPEMSNLDLTKILSKKYKELPEKKKMKYIQDFQREKQEFERNLARFREDHPDLIQNAKKSDIPEKPKTPQQLWYTHEKKVYLKVRPDATTKEVKDSLGKQWSQLSDKKRLKWIHKALEQRKEYEEIMRDYIQKHPELNISEEGITKSTLTKAERQLKDKFDGRPTKPPPNSYSLYCAELMANMKDVPSTERMVLCSQQWKLLSQKEKDAYHKKCDQKKKDYEVELLRFLESLPEEEQQRVLGEEKMLNINKKQATSPASKKPAQEGGKGGSEKPKRPVSAMFIFSEEKRRQLQEERPELSESELTRLLARMWNDLSEKKKAKYKAREAALKAQSERKPGGEREERGKLPESPKRAEEIWQQSVIGDYLARFKNDRVKALKAMEMTWNNMEKKEKLMWIKKAAEDQKRYERELSEMRAPPAATNSSKKMKFQGEPKKPPMNGYQKFSQELLSNGELNHLPLKERMVEIGSRWQRISQSQKEHYKKLAEEQQKQYKVHLDLWVKSLSPQDRAAYKEYISNKRKSMTKLRGPNPKSSRTTLQSKSESEEDDEEDEDDEDEDEEEEDDENGDSSEDGGDSSESSSEDESEDGDENEEDDEDEDDDEDDDEDEDNESEGSSSSSSSSGDSSDSDSN

SEQ ID NO: 15820 - protein, 393 aa, Homo sapiens
MALPRSQGHWSNKDILRLLECMENNRPSDDNSTFSSTQSHMDWGKVAFKNFSGEMCRLKWLEISCNLRKFGTLKELVLEAKKCVKKMNKSQKYRNGPDFPKRPLTAYNRFFKESWPQYSQMYPGMRSQELTKILSKKYRELPEQMKQKYIQDFRKEKQEFEEKLARFREEHPDLVQKAKKSSVSKRTQNKVQKKFQKNIEEVRSLPKTDRFFKKVKFHGEPQKPPMNGYHKFHQDSWSSKEMQHLSVRERMVEIGRRWQRIPQSQKDHFKSQAEELQKQYKVKLDLWLKTLSPENYAAYKESTYAKGKNMAMTGGPDPRLKQADPQSSSAKGLQEGFGEGQGLQAAGTDSSQTIWVNCHVSMEPEENRKKDREKEESSNSSDCSSGEEIEVDV

SEQ ID NO: 15821 - protein, 400 aa, Homo sapiens
MPAKDIKVALPRSQGHWSNADILRLLECMENNLPYDDNGTFSSTQSHMDWGKVAFKNFSGEMCRLKWLEISCSLRKFSTLKKLVLEAKKCVKNTNKSQKGRNHPDFPKRLLTAYIRFFKENWPQYSQMYPGMRSQEVTKILSKKYKELPEQMKQKHIQDFRKEKQEFEEKLARFREEHPDLDQKGKKSDICKRVQTKVQKKVQKNIEEVRSLPKTDQFFKKVKFHGEPQKPPMNGYQKFHQDSWSSKELQHLSLRERMVEIGRRWQRIPQSQKDHYKSQAELLQKEYKVELDLWLKTLSPEDYAAYKESTYAKGKNMAMMGGPAPSLKQTDPQSSSAKGLQEGFGEGQGLQAAGTEASQTIWVNCQVSMEPEDNRKKDGEEEESSNSLDCSSGEDMEVDV

SEQ ID NO: 15822 - protein, 531 aa, Homo sapiens
MMDGRLLEHPHAQFGGSLGGVVGFPYPLGHHHVYELAGHQLQSAAAAASVPFSIDGLLGGSCAAAASVVNPTPLLPAACGVGGDGQPFKLSDSGDPDKESPGCKRRRTRTNFTGWQLEELEKAFNESHYPDVFMREALALRLDLVESRVQVWFQNRRAKWRKKENTKKGPGRPAHNSHPTTCSGEPMDPEEIARKELEKMEKKKRKHEKKLLKSQGRHLHSPGGLSLHSAPSSDSDSGGGGLSPEPPEPPPPAAKGPGAHASGAAGTAPAPPGEPPAPGTCDPAFYPSQRSGAGPQPRPGRPADKDAASCGPGAAVAAVERGAAGLPKASPFSVESLLSDSPPRRKAASNAAAAAAAGLDFAPGLPCAPRTLIGKGHFLLYPITQPLGFLVPQAALKGGAGLEPAPKDAPPAPAVPPAPPAQASFGAFSGPGGAPDSAFARRSPDAVASPGAPAPAPAPFRDLASAAATEGGGGDCADAGTAGPAPPPPAPSPRPGPRPPSPAEEPATCGVPEPGAAAGPSPPEGEELDMD

SEQ ID NO: 15823 - protein, 810 aa, Homo sapiens
MSKGPGPGGSAASSAPPAATAQVLQAQPEKPQHYTYLKEFRTEQCPLFVQHKCTQHRPYTCFHWHFVNQRRRRSIRRRDGTFNYSPDVYCTKYDEATGLCPEGDECPFLHRTTGDTERRYHLRYYKTGICIHETDSKGNCTKNGLHCAFAHGPHDLRSPVYDIRELQAMEALQNGQTTVEGSIEGQSAGAASHAMIEKILSEEPRWQETAYVLGNYKTEPCKKPPRLCRQGYACPYYHNSKDRRRSPRKHKYRSSPCPNVKHGDEWGDPGKCENGDACQYCHTRTEQQFHPEIYKSTKCNDMQQSGSCPRGPFCAFAHVEQPPLSDDLQPSSAVSSPTQPGPVLYMPSAAGDSVPVSPSSPHAPDLSALLCRNSSLGSPSNLCGSPPGSIRKPPNLEGIVFPGESGLAPGSYKKAPGFEREDQVGAEYLKNFKCQAKLKPHSLEPRSQEQPLLQPKQDMLGILPAGSPLTSSISSSITSSLAATPPSPVGTSSVPGMNANALPFYPTSDTVESVIESALDDLDLNEFGVAALEKTFDNSTVPHPGSITIGGSLLQSSAPVNIPGSLGSSASFHSASPSPPVSLSSHFLQQPQGHLSQSENTFLGTSASHGSLGLNGMNSSIWEHFASGSFSPGTSPAFLSGPGAAELARLRQELDEANSTIKQWEESWKQAKQACDAWKKEAEEAGERASAAGAECELAREQRDALEVQVKKLQEELERLHAGPEPQALPAFSDLEALSLSTLYSLQKQLRAHLEQVDKAVFHMQSVKCLKCQEQKRAVLPCQHAALCELCAEGSECPICQPGRAHTLQS

SEQ ID NO: 15824 - protein, 680 aa, Homo sapiens
MPSVSKAAAAALSGSPPQTEKPTHYRYLKEFRTEQCPLFSQHKCAQHRPFTCFHWHFLNQRRRRPLRRRDGTFNYSPDVYCSKYNEATGVCPDGDECPYLHRTTGDTERKYHLRYYKTGTCIHETDARGHCVKNGLHCAFAHGPLDLRPPVCDVRELQAQEALQNGQLGGGEGVPDLQPGVLASQAMIEKILSEDPRWQDANFVLGSYKTEQCPKPPRLCRQGYACPHYHNSRDRRRNPRRFQYRSTPCPSVKHGDEWGEPSRCDGGDGCQYCHSRTEQQFHPESTKCNDMRQTGYCPRGPFCAFAHVEKSLGMVNEWGCHDLHLTSPSSTGSGQPGNAKRRDSPAEGGPRGSEQDSKQNHLAVFAAVHPPAPSVSSSVASSLASSAGSGSSSPTALPAPPARALPLGPASSTVEAVLGSALDLHLSNVNIASLEKDLEEQDGHDLGAAGPRSLAGSAPVAIPGSLPRAPSLHSPSSASTSPLGSLSQPLPGPVGSSAMTPPQQPPPLRSEPGTLGSAASSYSPLGLNGVPGSIWDFVSGSFSPSPSPILSAGPPSSSSASPNGAELARVRRQLDEAKRKIRQWEESWQQVKQVCDAWQREAQEAKERARVADSDRQLALQKKEEVEAQVIFQLRAKQCVACRERAHGAVLRPCQHHILCEPCAATAPECPYCKGQPLQW

SEQ ID NO: 15825 - protein, 310 aa, Homo sapiens
MKGQQKTAETEEGTVQIQEGAVATGEDPTSVAIASIQSAATFPDPNVKYVFRTENGGQVMYRVIQVSEGQLDGQTEGTGAISGYPATQSMTQAVIQGAFTSDDAVDTEGTAAETHYTYFPSTAVGDGAGGTTSGSTAAVVTTQGSEALLGQATPPGTGQFFVMMSPQEVLQGGSQRSIAPRTHPYSPKSEAPRTTRDEKRRAQHNEVERRRRDKINNWIVQLSKIIPDCSMESTKSGQSKGGILSKACDYIQELRQSNHRLSEELQGLDQLQLDNDVLRQQVEDLKNKNLLLRAQLRHHGLEVVIKNDSN

SEQ ID NO: 15826 - protein, 346 aa, Homo sapiens
MDMLDPGLDPAASATAAAAASHDKGPEAEEGVELQEGGDGPGAEEQTAVAITSVQQAAFGDHNIQYQFRTETNGGQVTYRVVQVTDGQLDGQGDTAGAVSVVSTAAFAGGQQAVTQVGVDGAAQRPGPAAASVPPGPAAPFPLAVIQNPFSNGGSPAAEAVSGEARFAYFPASSVGDTTAVSVQTTDQSLQAGGQFYVMMTPQDVLQTGTQRTIAPRTHPYSPKIDGTRTPRDERRRAQHNEVERRRRDKINNWIVQLSKIIPDCNADNSKTGASKGGILSKACDYIRELRQTNQRMQETFKEAERLQMDNELLRQQIEELKNENALLRAQLQQHNLEMVGEGTRQ

SEQ ID NO: 15827 - protein, 2245 aa, Homo sapiens
MPEMTENETPTKKQHRKKNRETHNAVERHRKKKINAGINRIGELIPCSPALKQSKNMILDQAFKYITELKRQNDELLLNGGNNEQAEEIKKLRKQLEEIQKENGRYIELLKANDICLYDDPTIHWKGNLKNSKVSVVIPSDQVQKKIIVYSNGNQPGGNSQGTAVQGITFNVSHNLQKQTANVVPVQRTCNLVTPVSISGVYPSENKPWHQTTVPALATNQPVPLCLPAAISAQSILELPTSESESNVLGATSGSLIAVSIESEPHQHHSLHTCLNDQNSSENKNGQENPKVLKKMTPCVTNIPHSSSATATKVHHGNKSCLSIQDFRGDFQNTFVVSVTTTVCSQPPRTAGDSSPMSISKSADLTSTATVVASSAPGVGKATIPISTLSGNPLDNGWTLSCSLPSSSVSTSDLKNINSLTRISSAGNTQTTWTTLQLAGNTIQPLSQTPSSAVTPVLNESGTSPTTSNHSRYVATDINLNNSFPADGQPVEQVVVTLPSCPSLPMQPLIAQPQVKSQPPKNILPLNSAMQVIQMAQPVGSAVNSAPTNQNVIILQPPSTTPCPTVMRAEVSNQTVGQQIVIIQAANQNPLPLLPAPPPGSVRLPINGANTVIGSNNSVQNVPTPQTFGGKHLVHILPRPSSLSASNSTQTFSVTMSNQQPQTISLNGQLFALQPVMSSSGTTNQTPMQIIQPTTSEDPNTNVALNTFGALASLNQSISQMAGQSCVQLSISQPANSQTAANSQTTTANCVSLTTTAAPPVTTDSSATLASTYNLVSTSSMNTVACLPNMKSKRLNKKPGGRKHLAANKSACPLNSVRDVSKLDCPNTEGSAEPPCNDGLLESFPAVLPSVSVSQANSVSVSASHSLGVLSSESLIPESVSKSKSAEKSSPPSQESVTSEHFAMAAAKSKDSTPNLQQETSQDKPPSSLALSDAAKPCASANVLIPSPSDPHILVSQVPGLSSTTSTTSTDCVSEVEIIAEPCRVEQDSSDTMQTTGLLKGQGLTTLLSDLAKKKNPQKSSLSDQMDHPDFSSENPKIVDSSVNLHPKQELLLMNNDDRDPPQHHSCLPDQEVINGSLINGRQADSPMSTSSGSSRSFSVASMLPETTREDVTSNATTNTCDSCTFVEQTDIVALAARAIFDQENLEKGRVGLQADIREVASKPSEASLLEGDPPFKSQIPKESGTGQAEATPNEFNSQGSIEATMERPLEKPSCSLGIKTSNASLQDSTSQPPSITSLSVNNLIHQSSISHPLASCAGLSPTSEQTTVPATVNLTVSSSSYGSQPPGPSLMTEYSQEQLNTMTSTIPNSQIQEPLLKPSHESRKDSAKRAVQDDLLLSSAKRQKHCQPAPLRLESMSLMSRTPDTISDQTQMMVSQIPPNSSNSVVPVSNPAHGDGLTRLFPPSNNFVTPALRQTEVQCGSQPSVAEQQQTQASQHLQALQQHVPAQGVSHLHSNHLYIKQQQQQQQQQQQQQQQQQAGQLRERHHLYQMQHHVPHAESSVHSQPHNVHQQRTLQQEVQMQKKRNLVQGTQTSQLSLQPKHHGTDQSRSKTGQPHPHHQQMQQQMQQHFGSSQTEKSCENPSTSRNHHNHPQNHLNQDIMHQQQDVGSRQQGSGVSSEHVSGHNPMQRLLTSRGLEQQMVSQPSIVTRSSDMTCTPHRPERNRVSSYSAEALIGKTSSNSEQRMGISIQGSRVSDQLEMRSYLDVPRNKSLAIHNMQGRVDHTVASDIRLSDCQTFKPSGASQQPQSNFEVQSSRNNEIGNPVSSLRSMQSQAFRISQNTGPPPIDRQKRLSYPPVQSIPTGNGIPSRDSENTCHQSFMQSLLAPHLSDQVIGSQRSLSEHQRNTQCGPSSAIEYNCPPTHENVHIRRESESQNRESCDMSLGAINTRNSTLNIPFSSSSSSGDIQGRNTSPNVSVQKSNPMRITESHATKGHMNPPVTTNMHGVARPALPHPSVSHGNGDQGPAVRQANSSVPQRSRHPLQDSSGSKIRQPERNRSGNQRQSTVFDPSLPHLPLSTGGSMILGRQQPATEKRGSIVRFMPDSPQVPNDNSGPDQHTLSQNFGFSFIPEGGMNPPINANASFIPQVTQPSATRTPALIPVDPQNTLPSFYPPYSPAHPTLSNDISIPYFPNQMFSNPSTEKVNSGSLNNRFGSILSPPRPVGFAQPSFPLLPDMPPMHMTNSHLSNFNMTSLFPEIATVLPDGSAMSPLLTIANSSASDSSKQSSNRPAHNISHILGHDCSSAV

SEQ ID NO: 15828 - protein, 341 aa, Homo sapiens
MLLRPRRPPPLAPPAPPSPASPDPEPRTPGDAPGTPPRRPASPSALGELGLPVSPGSAQRTPWSARETELLLGTLLQPAVWRALLLDRRQALPTYRRVSAALAQQQVRRTPAQCRRRYKFLKDKFREAHGQPPGPFDEQIRKLMGLLGDNGRKRPRRRSPGSGRPQRARRPVPNAHAPAPSEPDATPLPTARDRDADPTWTLRFSPSPPKSADASPAPGSPPAPAPTALATCIPEDRAPVRGPGSPPPPPAREDPDSPPGRPEDCAPPPAAPPSLNTALLQTLGHLGDIANILGPLRDQLLTLNQHVEQLRGAFDQTVSLAVGFILGSAAAERGVLRDPCQ

SEQ ID NO: 15829 - protein, 334 aa, Homo sapiens
MFGKPDKMDVRCHSDAEAARVSKNAHKESRESKGAEGNLPAAFLKEPQGAFSASGAAEDCNKSKSNSAADPDYCRRILVRDAKGSIREIILPKGLDLDRPKRTRTSFTAEQLYRLEMEFQRCQYVVGRERTELARQLNLSETQVKVWFQNRRTKQKKDQGKDSELRSVVSETAATCSVLRLLEQGRLLSPPGLPALLPPCATGALGSALRGPSLPALGAGAAAGSAAAAAAAAPGPAGAASPHPPAVGGAPGPGPAGPGGLHAGAPAAGHSLFSLPVPSLLGSVASRLSSAPLTMAGSLAGNLQELSARYLSSSAFEPYSRTNNKEGAEKKALD

SEQ ID NO: 15830 - protein, 290 aa, Homo sapiens
MGDGGAERDRGPARRAESGGGGGRCGDRSGAGDLRADGGGHSPTEVAGTSASSPAGSRESGADSDGQPGPGEADHCRRILVRDAKGTIREIVLPKGLDLDRPKRTRTSFTAEQLYRLEMEFQRCQYVVGRERTELARQLNLSETQVKVWFQNRRTKQKKDQSRDLEKRASSSASEAFATSNILRLLEQGRLLSVPRAPSLLALTPSLPGLPASHRGTSLGDPRNSSPRLNPLSSASASPPLPPPLPAVCFSSAPLLDLPAGYELGSSAFEPYSWLERKVGSASSCKKANT

SEQ ID NO: 15831 - protein, 427 aa, Homo sapiens
MEAMAASTSLPDPGDFDRNVPRICGVCGDRATGFHFNAMTCEGCKGFFRRSMKRKALFTCPFNGDCRITKDNRRHCQACRLKRCVDIGMMKEFILTDEEVQRKREMILKRKEEEALKDSLRPKLSEEQQRIIAILLDAHHKTYDPTYSDFCQFRPPVRVNDGGGSHPSRPNSRHTPSFSGDSSSSCSDHCITSSDMMDSSSFSNLDLSEEDSDDPSVTLELSQLSMLPHLADLVSYSIQKVIGFAKMIPGFRDLTSEDQIVLLKSSAIEVIMLRSNESFTMDDMSWTCGNQDYKYRVSDVTKAGHSLELIEPLIKFQVGLKKLNLHEEEHVLLMAICIVSPDRPGVQDAALIEAIQDRLSNTLQTYIRCRHPPPGSHLLYAKMIQKLADLRSLNEEHSKQYRCLSFQPECSMKLTPLVLEVFGNEIS

SEQ ID NO: 15832 - protein, 258 aa, Homo sapiens
MRLSSSPPRGPQQLSSFGSVDWLSQSSCSGPTHTPRPADFSLGSLPGPGQTSGAREPPQAVSIKEAAGSSNLPAPERTMAGLSKEPNTLRAPRVRTAFTMEQVRTLEGVFQHHQYLSPLERKRLAREMQLSEVQIKTWFQNRRMKHKRQMQDPQLHSPFSGSLHAPPAFYSTSSGLANGLQLLCPWAPLSGPQALMLPPGSFWGLCQVAQEALASAGASCCGQPLASHPPTPGRPSLGPALSTGPRGLCAMPQTGDAF

SEQ ID NO: 15833 - protein, 521 aa, Homo sapiens
MEANWTAFLFQAHEASHHQQQAAQNSLLPLLSSAVEPPDQKPLLPIPITQKPQGAPETLKDAIGIKKEKPKTSFVCTYCSKAFRDSYHLRRHESCHTGIKLVSRPKKTPTTVVPLISTIAGDSSRTSLVSTIAGILSTVTTSSSGTNPSSSASTTAMPVTQSVKKPSKPVKKNHACEMCGKAFRDVYHLNRHKLSHSDEKPFECPICNQRFKRKDRMTYHVRSHEGGITKPYTCSVCGKGFSRPDHLSCHVKHVHSTERPFKCQTCTAAFATKDRLRTHMVRHEGKVSCNICGKLLSAAYITSHLKTHGQSQSINCNTCKQGISKTCMSEETSNQKQQQQQQQQQQQQQQQQQQHVTSWPGKQVETLRLWEEAVKARKKEAANLCQTSTAATTPVTLTTPFSITSSVSSGTMSNPVTVAAAMSMRSPVNVSSAVNITSPMNIGHPVTITSPLSMTSPLTLTTPVNLPTPVTAPVNIAHPVTITSPMNLPTPMTLAAPLNIAMRPVESMPFLPQALPTSPPW

SEQ ID NO: 15834 - protein, 365 aa, Homo sapiens
MTGRDSLSDGRTSSRALVPGGSPRGSRPRGFAITDLLGLEAELPAPAGPGQGSGCEGPAVAPCPGPGLDGSSLARGALPLGLGLLCGFGTQPPAAARAPCLLLADVPFLPPRGPEPAAPLAPSRPPPALGRQKRSDSVSTSDEDSQSEDRNDLKASPTLGKRKKRRHRTVFTAHQLEELEKAFSEAHYPDVYAREMLAVKTELPEDRIQVWFQNRRAKWRKREKRWGGSSVMAEYGLYGAMVRHCIPLPDSVLNSAEGGLLGSCAPWLLGMHKKSMGMIRKPGSEDKLAGLWGSDHFKEGSSQSESGSQRGSDKVSPENGLEDVAIDLSSSARQETKKVHPGAGAQGGSNSTALEGPQPGKVGAT

SEQ ID NO: 15835 - protein, 361 aa, Homo sapiens
MTGKAGEALSKPKSETVAKSTSGGAPARCTGFGIQEILGLNKEPPSSHPRAALDGLAPGHLLAARSVLSPAGVGGMGLLGPGGLPGFYTQPTFLEVLSDPQSVHLQPLGRASGPLDTSQTASSDSEDVSSSDRKMSKSALNQTKKRKKRRHRTIFTSYQLEELEKAFNEAHYPDVYAREMLAMKTELPEDRIQVWFQNRRAKWRKREKCWGRSSVMAEYGLYGAMVRHSIPLPESILKSAKDGIMDSCAPWLLGMHKKSLEAAAESGRKPEGERQALPKLDKMEQDERGPDAQAAISQEELRENSIAVLRAKAQEHSTKVLGTVSGPDSLARSTEKPEEEEAMDEDRPAERLSPPQLEDMA

SEQ ID NO: 15836 - protein, 1129 aa, Homo sapiens
MPATRKPMRYGHTEGHTEVCFDDSGSFIVTCGSDGDVRIWEDLDDDDPKFINVGEKAYSCALKSGKLVTAVSNNTIQVHTFPEGVPDGILTRFTTNANHVVFNGDGTKIAAGSSDFLVKIVDVMDSSQQKTFRGHDAPVLSLSFDPKDIFLASASCDGSVRVWQISDQTCAISWPLLQKCNDVINAKSICRLAWQPKSGKLLAIPVEKSVKLYRRESWSHQFDLSDNFISQTLNIVTWSPCGQYLAAGSINGLIIVWNVETKDCMERVKHEKGYAICGLAWHPTCGRISYTDAEGNLGLLENVCDPSGKTSSSKVSSRVEKDYNDLFDGDDMSNAGDFLNDNAVEIPSFSKGIINDDEDDEDLMMASGRPRQRSHILEDDENSVDISMLKTGSSLLKEEEEDGQEGSIHNLPLVTSQRPFYDGPMPTPRQKPFQSGSTPLHLTHRFMVWNSIGIIRCYNDEQDNAIDVEFHDTSIHHATHLSNTLNYTIADLSHEAILLACESTDELASKLHCLHFSSWDSSKEWIIDLPQNEDIEAICLGQGWAAAATSALLLRLFTIGGVQKEVFSLAGPVVSMAGHGEQLFIVYHRGTGFDGDQCLGVQLLELGKKKKQILHGDPLPLTRKSYLAWIGFSAEGTPCYVDSEGIVRMLNRGLGNTWTPICNTREHCKGKSDHYWVVGIHENPQQLRCIPCKGSRFPPTLPRPAVAILSFKLPYCQIATEKGQMEEQFWRSVIFHNHLDYLAKNGYEYEESTKNQATKEQQELLMKMLALSCKLEREFRCVELADLMTQNAVNLAIKYASRSRKLILAQKLSELAVEKAAELTATQVEEEEEEEDFRKKLNAGYSNTATEWSQPRFRNQVEEDAEDSGEADDEEKPEIHKPGQNSFSKSTNSSDVSAKSGAVTFSSQGRVNPFKVSASSKEPAMSMNSARSTNILDNMGKSSKKSTALSRTTNNEKSPIIKPLIPKPKPKQASAASYFQKRNSQTNKTEEVKEENLKNVLSETPAICPPQNTENQRPKTGFQMWLEENRSNILSDNPDFSDEADIIKEGMIRFRVLSTEERKVWANKAKGETASEGTEAKKRKRVVDESDETENQEEKAKENLNLSKKQKPLDFSTNQKLSAFAFKQE

SEQ ID NO: 15837 - protein, 1365 aa, Homo sapiens
MEFSIKQSPLSVQSVVKCIKMKQAPEILGSANGKTPSCEVNRECSVFLSKAQLSSSLQEGVMQKFNGHDALPFIPADKLKDLTSRVFNGEPGAHDAKLRFESQEMKGIGTPPNTTPIKNGSPEIKLKITKTYMNGKPLFESSICGDSAADVSQSEENGQKPENKARRNRKRSIKYDSLLEQGLVEAALVSKISSPSDKKIPAKKESCPNTGRDKDHLLKYNVGDLVWSKVSGYPWWPCMVSADPLLHSYTKLKGQKKSARQYHVQFFGDAPERAWIFEKSLVAFEGEGQFEKLCQESAKQAPTKAEKIKLLKPISGKLRAQWEMGIVQAEEAASMSVEERKAKFTFLYVGDQLHLNPQVAKEAGIAAESLGEMAESSGVSEEAAENPKSVREECIPMKRRRRAKLCSSAETLESHPDIGKSTPQKTAEADPRRGVGSPPGRKKTTVSMPRSRKGDAASQFLVFCQKHRDEVVAEHPDASGEEIEELLRSQWSLLSEKQRARYNTKFALVAPVQAEEDSGNVNGKKRNHTKRIQDPTEDAEAEDTPRKRLRTDKHSLRKRDTITDKTARTSSYKAMEAASSLKSQAATKNLSDACKPLKKRNRASTAASSALGFSKSSSPSASLTENEVSDSPGDEPSESPYESADETQTEVSVSSKKSERGVTAKKEYVCQLCEKPGSLLLCEGPCCGAFHLACLGLSRRPEGRFTCSECASGIHSCFVCKESKTDVKRCVVTQCGKFYHEACVKKYPLTVFESRGFRCPLHSCVSCHASNPSNPRPSKGKMMRCVRCPVAYHSGDACLAAGCSVIASNSIICTAHFTARKGKRHHAHVNVSWCFVCSKGGSLLCCESCPAAFHPDCLNIEMPDGSWFCNDCRAGKKLHFQDIIWVKLGNYRWWPAEVCHPKNVPPNIQKMKHEIGEFPVFFFGSKDYYWTHQARVFPYMEGDRGSRYQGVRGIGRVFKNALQEAEARFREIKLQREARETQESERKPPPYKHIKVNKPYGKVQIYTADISEIPKCNCKPTDENPCGFDSECLNRMLMFECHPQVCPAGEFCQNQCFTKRQYPETKIIKTDGKGWGLVAKRDIRKGEFVNEYVGELIDEEECMARIKHAHENDITHFYMLTIDKDRIIDAGPKGNYSRFMNHSCQPNCETLKWTVNGDTRVGLFAVCDIPAGTELTFNYNLDCLGNEKTVCRCGASNCSGFLGDRPKTSTTLSSEEKGKKTKKKTRRRRAKGEGKRQSEDECFRCGDGGQLVLCDRKFCTKAYHLSCLGLGKRPFGKWECPWHHCDVCGKPSTSFCHLCPNSFCKEHQDGTAFSCTPDGRSYCCEHDLGAASVRSTKTEKPPPEPGKPKGKRRRRRGWRRVTEGK

SEQ ID NO: 15838 - protein, 1651 aa, Homo sapiens
MEGSLAGSLAAPDRPQGPERLPGPAPRENIEGGAEAAEGEGGIFRSTRYLPVTKEGPRDILDGRGGISGTPDGRGPWEHPLVQEAGEGILSERRFEDSVIVRTMKPHAELEGSRRFLHHRGEPRLLEKHAQGRPRFDWLQDEDEQGSPQDAGLHLDLPAQPPPLAPFRRVFVPVEDTPKTLDMAVVGGREDLEDLEGLAQPSEWGLPTSASEVATQTWTVNSEASVERLQPLLPPIRTGPYLCELLEEVAEGVASPDEDEDEEPAVFPCIECSIYFKQKEHLLEHMSQHRRAPGQEPPADLAPLACGECGWAFADPTALEQHRQLHQASREKIIEEIQKLKQVPGDEGREARLQCPKCVFGTNSSRAYVQHAKLHMREPPGQTTKEPFGGSSGAGSPSPEASALLYQPYGAAVGLSACVFCGFPAPSESLLREHVRLVHAHPHWEEDGEAYEEDPASQPGTSQDAHACFPDTAVDYFGKAEPSLAPMWRENPAGYDPSLAFGPGCQQLSIRDFPLSKPLLHGTGQRPLGRLAFPSTLASTPYSLQLGRNKSTVHPQGLGERRRPWSEEEEEEEEEEDVVLTSEMDFSPENGVFSPLATPSLIPQAALELKQAFREALQAVEATQGQQQQLRGMVPIVLVAKLGPQVMAAARVPPRLQPEELGLAGAHPLDFLLLDAPLGGPLGLDTLLDGDPAMALKHEERKCPYCPDRFHNGIGLANHVRGHLNRVGVSYNVRHFISAEEVKAIERRFSFQKKKKKVANFDPGTFSLMRCDFCGAGFDTRAGLSSHARAHLRDFGITNWELTVSPINILQELLATSAAEQPPSPLGREPGGPPGSFLTSRRPRLPLTVPFPPTWAEDPGPAYGDAQSLTTCEVCGACFETRKGLSSHARSHLRQLGVAESESSGAPIDLLYELVKQKGLPDAHLGLPPGLAKKSSSLKEVVAGAPRPGLLSLAKPLDAPAVNKAIKSPPGFSAKGLGHPPSSPLLKKTPLALAGSPTPKNPEDKSPQLSLSPRPASPKAQWPQSEDEGPLNLTSGPEPARDIRCEFCGEFFENRKGLSSHARSHLRQMGVTEWYVNGSPIDTLREILKRRTQSRPGGPPNPPGPSPKALAKMMGGAGPGSSLEARSPSDLHISPLAKKLPPPPGSPLGHSPTASPPPTARKMFPGLAAPSLPKKLKPEQIRVEIKREMLPGALHGELHPSEGPWGAPREDMTPLNLSSRAEPVRDIRCEFCGEFFENRKGLSSHARSHLRQMGVTEWSVNGSPIDTLREILKKKSKPCLIKKEPPAGDLAPALAEDGPPTVAPGPVQSPLPLSPLAGRPGKPGAGPAQVPRELSLTPITGAKPSATGYLGSVAAKRPLQEDRLLPAEVKAKTYIQTELPFKAKTLHEKTSHSSTEACCELCGLYFENRKALASHARAHLRQFGVTEWCVNGSPIETLSEWIKHRPQKVGAYRSYIQGGRPFTKKFRSAGHGRDSDKRPSLGLAPGGLAVVGRSAGGEPGPEAGRAADGGERPLAASPPGTVKAEEHQRQNINKFERRQARPPDASAARGGEDTNDLQQKLEEVRQPPPRVRPVPSLVPRPPQTSLVKFVGNIYTLKCRFCEVEFQGPLSIQEEWVRHLQRHILEMNFSKADPPPEESQAPQAQTAAAEAP

SEQ ID NO: 15839 - protein, 449 aa, Homo sapiens
MGSDVRDLNALLPAVPSLGGGGGCALPVSGAAQWAPVLDFAPPGASAYGSLGGPAPPPAPPPPPPPPPHSFIKQEPSWGGAEPHEEQCLSAFTVHFSGQFTGTAGACRYGPFGPPPPSQASSGQARMFPNAPYLPSCLESQPAIRNQGYSTVTFDGTPSYGHTPSHHAAQFPNHSFKHEDPMGQQGSLGEQQYSVPPPVYGCHTPTDSCTGSQALLLRTPYSSDNLYQMTSQLECMTWNQMNLGATLKGVAAGSSSSVKWTEGQSNHSTGYESDNHTTPILCGAQYRIHTHGVFRGIQDVRRVPGVAPTLVRSASETSEKRPFMCAYPGCNKRYFKLSHLQMHSRKHTGEKPYQCDFKDCERRFSRSDQLKRHQRRHTGVKPFQCKTCQRKFSRSDHLKTHTRTHTGKTSEKPFSCRWPSCQKKFARSDELVRHHNMHQRNMTKLQLAL

SEQ ID NO: 15840 - protein, 261 aa, Homo sapiens
MVVVAAAPNPADGTPKVLLLSGQPASAAGAPAGQALPLMVPAQRGASPEAASGGLPQARKRQRLTHLSPEEKALRRKLKNRVAAQTARDRKKARMSELEQQVVDLEEENQKLLLENQLLREKTHGLVVENQELRQRLGMDALVAEEEAEAKGNEVRPVAGSAESAALRLRAPLQQVQAQLSPLQNISPWILAVLTLQIQSLISCWAFWTTWTQSCSSNALPQSLPAWRSSQRSTQKDPVPYQPPFLCQWGRHQPSWKPLMN

SEQ ID NO: 15841 - protein, 324 aa, Homo sapiens
MSSEAETQQPPAAPPAAPALSAADTKPGTTGSGAGSGGPGGLTSAAPAGGDKKVIATKVLGTVKWFNVRNGYGFINRNDTKEDVFVHQTAIKKNNPRKYLRSVGDGETVEFDVVEGEKGAEAANVTGPGGVPVQGSKYAADRNHYRRYPRRRGPPRNYQQNYQNSESGEKNEGSESAPEGQAQQRRPYRRRRFPPYYMRRPYGRRPQYSNPPVQGEVMEGADNQGAGEQGRPVRQNMYRGYRPRFRRGPPRQRQPREDGNEEDKENQGDETQGQQPPQRRYRRNFNYRRRRPENPKPQDGKETKAADPPAENSSAPEAEQGGAE

SEQ ID NO: 15842 - protein, 364 aa, Homo sapiens
MSEVEAAAGATAVPAATVPATAAGVVAVVVPVPAGEPQKGGGAGGGGGAASGPAAGTPSAPGSRTPGNPATAVSGTPAPPARSQADKPVLAIQVLGTVKWFNVRNGYGFINRNDTKEDVFVHQTAIKRNNPRKFLRSVGDGETVEFDVVEGEKGAEATNVTGPGGVPVKGSRYAPNRRKSRRFIPRPPSVAPPPMVAEIPSAGTGPGSKGERAEDSGQRPRRWCPPPFFYRRRFVRGPRPPNQQQPIEGTDRVEPKETAPLEGHQQQGDERVPPPRFRPRYRRPFRPRPRQQPTTEGGDGETKPSQGPADGSRPEPQRPRNRPYFQRRRQQAPGPQQAPGPRQPAAPETSAPVNSGDPTTTILE

SEQ ID NO: 15843 - protein, 372 aa, Homo sapiens
MSEAGEATTTTTTTLPQAPTEAAAAAPQDPAPKSPVGSGAPQAAAPAPAAHVAGNPGGDAAPAATGTAAAASLATAAGSEDAEKKVLATKVLGTVKWFNVRNGYGFINRNDTKEDVFVHQTAIKKNNPRKYLRSVGDGETVEFDVVEGEKGAEAANVTGPDGVPVEGSRYAADRRRYRRGYYGRRRGPPRNYAGEEEEEGSGSSEGFDPPATDRQFSGARNQLRRPQYRPQYRQRRFPPYHVGQTFDRRSRVLPHPNRIQAGEIGEMKDGVPEGAQLQGPVHRNPTYRPRYRSRGPPRPRPAPAVGEAEDKENQQATSGPNQPSVRRGYRRPYNYRRRPRPPNAPSQDGKEAKAGEAPTENPAPPTQQSSAE

SEQ ID NO: 15844 - protein, 1422 aa, Homo sapiens
MSGIKRTIKETDPDYEDVSVALPNKRHKAIENSARDAAVQKIETIIKEQFALEMKNKEHEIEVIDQRLIEARRMMDKLRACIVANYYASAGLLKVSEGSKTCDTMVFNHPAIKKFLESPSRSSSPANQRAETPSANHSESDSLSQHNDFLSDKDNNSNMDIEERLSNNMEQRPSRNTGRDTSRITGSHKTEQRNADLTDETSRLFVKKTIVVGNVSKYIPPDKREENDQSTHKWMVYVRGSRREPSINHFVKKVWFFLHPSYKPNDLVEVREPPFHLTRRGWGEFPVRVQVHFKDSQNKRIDIIHNLKLDRTYTGLQTLGAETVVDVELHRHSLGEDCIYPQSSESDISDAPPSLPLTIPAPVKASSPIKQSHEPVPDTSVEKGFPASTEAERHTPFYALPSSLERTPTKMTTSQKVTFCSHGNSAFQPIASSCKIVPQSQVPNPESPGKSFQPITMSCKIVSGSPISTPSPSPLPRTPTSTPVHVKQGTAGSVINNPYVIMDKQPGQVIGATTPSTGSPTNKISTASQVSQGTGSPVPKIHGSSFVTSTVKQEDSLFASMPPLCPIGSHPKVQSPKPITGGLGAFTKVIIKQEPGEAPHVPATGAASQSPLPQYVTVKGGHMIAVSPQKQVITPGEGIAQSAKVQPSKVVGVPVGSALPSTVKQAVAISGGQILVAKASSSVSKAVGPKQVVTQGVAKAIVSGGGGTIVAQPVQTLTKAQVTAAGPQKSGSQGSVMATLQLPATNLANLANLPPGTKLYLTTNSKNPSGKGKLLLIPQGAILRATNNANLQSGSAASGGSGAGGGGGGGGGGGSGSGGGGSTGGGGGTAGGGTQSTAGPGGISQHLTYTSYILKQTPQGTFLVGQPSPQTSGKQLTTGSVVQGTLGVSTSSAQGQQTLKVISGQKTTLFTQAAHGGQASLMKISDSTLKTVPATSQLSKPGTTMLRVAGGVITTATSPAVALSANGPAQQSEGMAPVSSSTVSSVTKTSGQQQVCVSQATVGTCKAATPTVVSATSLVPTPNPISGKATVSGLLKIHSSQSSPQQAVLTIPSQLKPLSVNTSGGVQTILMPVNKVVQSFSTSKPPAILPVAAPTPVVPSSAPAAVAKVKTEPETPGPSCLSQEGQTAVKTEESSELGNYVIKIDHLETIQQLLTAVVKKIPLITAKSEDASCFSAKSVEQYYGWNIGKRRAAEWQRAMTMRKVLQEILEKNPRFHHLTPLKTKHIAHWCRCHGYTPPDPESLRNDGDSIEDVLTQIDSEPECPSSFSSADNLCRKLEDLQQFQKREPENEEEVDILSLSEPVKINIKKEQEEKQEEVKFYLPPTPGSEFIGDVTQKIGITLQPVALHRNVYASVVEDMILKATEQLVNDILRQALAVGYQTASHNRIPKEITVSNIHQAICNIPFLDFLTNKHMGILNEDQ

SEQ ID NO: 15845 - protein, 227 aa, Homo sapiens
MFKRMAEFGPDSGGRVKGVTIVKPIVYGNVARYFGKKREEDGHTHQWTVYVKPYRNEDMSAYVKKIQFKLHESYGNPLRVVTKPPYEITETGWGEFEIIIKIFFIDPNERPVTLYHLLKLFQSDTNAMLGKKTVVSEFYDEMIFQDPTAMMQQLLTTSRQLTLGAYKHETEFAELEVKTREKLEAAKKKTSFEIAELKERLKASRETINCLKNEIRKLEEDDQAKDI

SEQ ID NO: 15846 - protein, 414 aa, Homo sapiens
MASGDTLYIATDGSEMPAEIVELHEIEVETIPVETIETTVVGEEEEEDDDDEDGGGGDHGGGGGHGHAGHHHHHHHHHHHPPMIALQPLVTDDPTQVHHHQEVILVQTREEVVGGDDSDGLRAEDGFEDQILIPVPAPAGGDDDYIEQTLVTVAAAGKSGGGGSSSSGGGRVKKGGGKKSGKKSYLSGGAGAAGGGGADPGNKKWEQKQVQIKTLEGEFSVTMWSSDEKKDIDHETVVEEQIIGENSPPDYSEYMTGKKLPPGGIPGIDLSDPKQLAEFARMKPRKIKEDDAPRTIACPHKGCTKMFRDNSAMRKHLHTHGPRVHVCAECGKAFVESSKLKRHQLVHTGEKPFQCTFEGCGKRFSLDFNLRTHVRIHTGDRPYVCPFDGCNKKFAQSTNLKSHILTHAKAKNNQ

SEQ ID NO: 15847 - protein, 372 aa, Homo sapiens
MASNEDFSITQDLEIPADIVELHDINVEPLPMEDIPTESVQYEDVDGNWIYGGHNHPPLMVLQPLFTNTGYGDHDQEMLMLQTQEEVVGYCDSDNQLGNDLEDQLALPDSIEDEHFQMTLASLSASAASTSTSTQSRSKKPSKKPSGKSATSTEANPAGSSSSLGTRKWEQKQMQVKTLEGEFSVTMWSPNDNNDQGAVGEGQAENPPDYSEYLKGKKLPPGGLPGIDLSDPKQLAEFTKVKPKRSKGEPPKTVPCSYSGCEKMFRDYAAMRKHLHIHGPRVHVCAECGKAFLESSKLRRHQLVHTGEKPFQCTFEGCGKRFSLDFNLRTHLRIHTGDKPFVCPFDVCNRKFAQSTNLKTHILTHVKTKNNP

SEQ ID NO: 15848 - protein, 694 aa, Homo sapiens
MENKSLESSQTDLKLVAHPRAKSKVWKYFGFDTNAEGCILQWKKIYCRICMAQIAYSGNTSNLSYHLEKNHPEEFCEFVKSNTEQMREAFATAFSKLKPESSQQPGQDALAVKAGHGYDSKKQQELTAAVLGLICEGLYPASIVDEPTFKVLLKTADPRYELPSRKYISTKAIPEKYGAVREVILKELAEATWCGISTDMWRSENQNRAYVTLAAHFLGLGAPNCLSMGSRCLKTFEVPEENTAETITRVLYEVFIEWGISAKVFGATTNYGKDIVKACSLLDVAVHMPCLGHTFNAGIQQAFQLPKLGALLSRCRKLVEYFQQSAVAMYMLYEKQKQQNVAHCMLVSNRVSWWGSTLAMLQRLKEQQFVIAGVLVEDSNNHHLMLEASEWATIEGLVELLQPFKQVAEMLSASRYPTISMVKPLLHMLLNTTLNIKETDSKELSMAKEVIAKELSKTYQETPEIDMFLNVATFLDPRYKRLPFLSAFERQQVENRVVEEAKGLLDKVKDGGYRPAEDKIFPVPEEPPVKKLMRTSTPPPASVINNMLAEIFCQTGGVEDQEEWHAQVVEELSNFKSQKVLGLNEDPLKWWSDRLALFPLLPKVLQKYWCVTATRVAPERLFGSAANVVSAKRNRLAPAHVDEQVFLYENARSGAEAEPEDQDEGEWGLDQEQVFSLGDGVSGGFFGIRDSSFL

SEQ ID NO: 15849 - protein, 218 aa, Homo sapiens
MMRREDEEEEGTMMKAKGDLEMKEEEEISETGELVGPFVSAMPTPMPHNKGTRFSEAWEYFHLAPARAGHHPNQYATCRLCGRQVSRGPGVNVGTTALWKHLKSMHREELEKSGHGQAGQRQDPRPHGPQLPTGIEGNWGRLLEQVGTMALWASQREKEVLRRERAVEWRERAVEKRERALEEVERAILEMKWKVRAEKEACQREKELPAAVHPFHFV

SEQ ID NO: 15850 - protein, 234 aa, Homo sapiens
MRSGEPACTMDQARGLDDAAARGGQCPGLGPAPTPTPPGRLGAPYSEAWGYFHLAPGRPGHPSGHWATCRLCGEQVGRGPGFHAGTSALWRHLRSAHRRELESSGAGSSPPAAPCPPPPGPAAAPEGDWARLLEQMGALAVRGSRRERELERRELAVEQGERALERRRRALQEEERAAAQARRELQAEREALQARLRDVSRREGALGWAPAAPPPLKDDPEGDRDGCVITKVLL

SEQ ID NO: 15851 - protein, 1171 aa, Homo sapiens
MENNLKTCPKEDGDFVSDKIKFKIEEEDDDGIPPDSLERMDFKSEQEDMKQTDSGGERAGLGGTGCSCKPPGKYLSAESEDDYGALFSQYSSTLYDVAMEAVTQSLLSSRNMSSRKKSPAWKHFFISPRDSTKAICMYCVKEFSRGKNEKDLSTSCLMRHVRRAHPTVLIQENGSVSAVSSFPSPSLLLPPQPADAGDLSTILSPIKLVQKVASKIPSPDRITEESVSVVSSEEISSDMSVSEKCGREEALVGSSPHLPALHYDEPAENLAEKSLPLPKSTSGSRRRSAVWKHFYLSPLDNSKAVCIHCMNEFSRGKNGKDLGTSCLIRHMWRAHRAIVLQENGGTGIPPLYSTPPTLLPSLLPPEGELSSVSSSPVKPVRESPSASSSPDRLTEDLQSHLNPGDGLMEDVAAFSSSDDIGEASASSPEKQQADGLSPRLFESGAIFQQNKKVMKRLKSEVWHHFSLAPMDSLKAECRYCGCAISRGKKGDVGTSCLMRHLYRRHPEVVGSQKGFLGASLANSPYATLASAESSSSKLTDLPTVVTKNNQVMFPVNSKKTSKLWNHFSICSADSTKVVCLHCGRTISRGKKPTNLGTSCLLRHLQRFHSNVLKTEVSETARPSSPDTRVPRGTELSGASSFDDTNEKFYDSHPVAKKITSLIAEMIALDLQPYSFVDNVGFNRLLEYLKPQYSLPAPSYFSRTAIPGMYDNVKQIIMSHLKEAESGVIHFTSGIWMSNQTREYLTLTAHWVSFESPARPRCDDHHCSALLDVSQVDCDYSGNSIQKQLECWWEAWVTSTGLQVGITVTDNASIGKTLNEGEHSSVQCFSHTVNLIVSEAIKSQRMVQNLLSLARKICERVHRSPKAKEKLAELQREYALPQHHLIQDVPSKWSTSFHMLERLIEQKRAINEMSVECNFRELISCDQWEVMQSVCRALKPFEAASREMSTQMSTLSQVIPMVHILNRKVEMLFEETMGIDTMLRSLKEAMVSRLSATLHDPRYVFATLLDPRYKASLFTEEEAEQYKQDLIRELELMNSTSEDVAASHRCDAGSPSKDSAAEENLWSLVAKVKKKDPREKLPEAMVLAYLEEEVLEHSCDPLTYWNLKKASWPGLSALAVRFLGCPPSIVPSEKLFNTPTENGSLGQSRLMMEHFEKLIFLKVNLPLIYFQY

SEQ ID NO: 15852 - protein, 693 aa, Homo sapiens
MIAPLLCILSYNFNTFAILNVYSKLTMFCTTNSLPMDLLLKQGSLKQEVESFCYQIVSESNDQKVGILQSEDKQLQPSVSKKSEGELSRVKFISNSNKITFSKKPKRRKYDESYLSFGFTYFGNRDAPHAQCVLCKKILSNSSLAPSKLRRHLETKHAAYKDKDISFFKQHLDSPENNKPPTPKIVNTDNESATEASYNVSYHIALSGEAHTIGELLIKPCAKDVVMRMFDEQYSKKIDAVQLSNSTVARRIKDLAADIEEELVCRLKICDGFSLQLDESADVSGLAVLLVFVRYRFNKSIEEDLLLCESLQSNATGEEIFNCINSFMQKHEIEWEKCVDVCSDASRAVDGKIAEAVTLIKYVAPESTSSHCLLYRHALAVKIMPTSLKNVLDQAVQIINYIKARPHQSRLLKILCEEMGAQHTALLLNTEVRWLSRGKVLVRLFELRRELLVFMDSAFRLSDCLTNSSWLLRLAYLADIFTKLNEVNLSMQGKNVTVFTVFDKMSSLLRKLEFWASSVEEENFDCFPTLSDFLTEINSTVDKDICSAIVQHLRGLRATLLKYFPVTNDNNAWVRNPFTVTVKPASLVARDYESLIDLTSDSQVKQNFSELSLNDFWSSLIQEYPSIARRAVRVLLPFATMHLCETGFSYYAATKTKYRKRLDAAPHMRIRLSNITPNIKRICDKKTQKHCSH

SEQ ID NO: 15853 - protein, 979 aa, Homo sapiens
MSVCTLSVPVSSLSPGRRCNTFSDSGILGCVPINSNTDEEDVVEEKMVAEGVNKEAKQPAKKKRKKGLRIKGKRRRKKLILAKKFSKDLGSGRPVADAPALLASNDPEQDEESLFESNIEKQIYLPSTRAKTSIVWHFFHVDPQYTWRAICNLCEKSVSRGKPGSHLGTSTLQRHLQARHSPHWTRANKFGVASGEEDFTLDVSLSPSSGSNGSFEYIPTDPLDDNRMGKKHDKSASDALRAERGRFLIKSNIVKHALIPGTRAKTSAVWNFFYTDPQHISRAVCNICKRSVSRGRPGSHLGTSTLQRHLQATHPIHWAVANKDSGAVANGLDEAETERSDLLSDTLHGEKSTGSQDLTAEDLSDSDSDEPMLEVENRSESPIPVAEQGTLMRAQERETTCCGNPVSSHISQAIIQMIVEDMHPYNYFSTPAFQRFMQIVAPDYRLPSETYFFTKAVPQLYDCVREKIFLTLENVQSQKIHLTVDIWTHDPSTDYFIVTVHWVSLETASFLNNGRIPDFRKWAVLCVTGLAKDCLITNILQELNDQIGLWLSPNFLIPSFIVSDNSSNVVHAIKDGGFTHVPCFLHCLNMVIQDFFCEHKSIENMLVAARKTCHHFSHSVKARQILQEFQNDHQLPWKNLKQDETGHWISTFYMLKWLLEHCYSVHHSLGRASGVVLTSLQWTLMTYVCDILKPFEEATQKVSVKTAGLNQVLPLIHHLLLSLQKLREDFQVRGITQALNLVDSLSLKLETDTLLSAMLKSKPCILATLLDPCFKNSLEDFFPQGADLETYKQFLAEEVCNYMESSPEICQIPTSEASCPSVTVGADSFTSSLKEGTSSSGSVDSSAVDNVALGSKSFMFPSAVAVVDEYFKEKYSEFSGGDDPLIYWQRKISIWPALTQVAIQYLSCPMCSWQSECIFTKNSHFHPKQIMSLDFDNIEQLMFLKMNLKNVNYDYSTLVLSWDPEQNEVVQSSEKEILP

SEQ ID NO: 15854 - protein, 429 aa, Homo sapiens
MAQAPADPGREGHLEQRILQVLTEAGSPVKLAQLVKECQAPKRELNQVLYRMKKELKVSLTSPATWCLGGTDPEGEGPAELALSSPAERPQQHAATIPETPGPQFSQQREEDIYRFLKDNGPQRALVIAQALGMRTAKDVNRDLYRMKSRHLLDMDEQSKAWTIYRPEDSGRRAKSASIIYQHNPINMICQNGPNSWISIANSEAIQIGHGNIITRQTVSREDGSAGPRHLPSMAPGDSSTWGTLVDPWGPQDIHMEQSILRRVQLGHSNEMRLHGVPSEGPAHIPPGSPPVSATAAGPEASFEARIPSPGTHPEGEAAQRIHMKSCFLEDATIGNSNKMSISPGVAGPGGVAGSGEGEPGEDAGRRPADTQSRSHFPRDIGQPITPSHSKLTPKLETMTLGNRSHKAAEGSHYVDEASHEGSWWGGGI

SEQ ID NO: 15855 - protein, 577 aa, Homo sapiens
MNKLYIGNLNESVTPADLEKVFAEHKISYSGQFLVKSGYAFVDCPDEHWAMKAIETFSGKVELQGKRLEIEHSVPKKQRSRKIQIRNIPPQLRWEVLDSLLAQYGTVENCEQVNTESETAVVNVTYSNREQTRQAIMKLNGHQLENHALKVSYIPDEQIAQGPENGRRGGFGSRGQPRQGSPVAAGAPAKQQQVDIPLRLLVPTQYVGAIIGKEGATIRNITKQTQSKIDVHRKENAGAAEKAISVHSTPEGCSSACKMILEIMHKEAKDTKTADEVPLKILAHNNFVGRLIGKEGRNLKKVEQDTETKITISSLQDLTLYNPERTITVKGAIENCCRAEQEIMKKVREAYENDVAAMSLQSHLIPGLNLAAVGLFPASSSAVPPPPSSVTGAAPYSSFMQAPEQEMVQVFIPAQAVGAIIGKKGQHIKQLSRFASASIKIAPPETPDSKVRMVIITGPPEAQFKAQGRIYGKLKEENFFGPKEEVKLETHIRVPASAAGRVIGKGGKTVNELQNLTAAEVVVPRDQTPDENDQVIVKIIGHFYASQMAQRKIRDILAQVKQQHQKGQSNQAQARRK

SEQ ID NO: 15856 - protein, 713 aa, Homo sapiens
MAKPSHSSYVLQQLNNQREWGFLCDCCIAIDDIYFQAHKAVLAACSSYFRMFFMNHQHSTAQLNLSNMKISAECFDLILQFMYLGKIMTAPSSFEQFKVAMNYLQLYNVPDCLEDIQDADCSSSKCSSSASSKQNSKMIFGVRMYEDTVARNGNEANRWCAEPSSTVNTPHNREADEESLQLGNFPEPLFDVCKKSSVSKLSTPKERVSRRFGRSFTCDSCGFGFSCEKLLDEHVLTCTNRHLYQNTRSYHRIVDIRDGKDSNIKAEFGEKDSSKTFSAQTDKYRGDTSQAADDSASTTGSRKSSTVESEIASEEKSRAAERKRIIIKMEPEDIPTDELKDFNIIKVTDKDCNESTDNDELEDEPEEPFYRYYVEEDVSIKKSGRKTLKPRMSVSADERGGLENMRPPNNSSPVQEDAENASCELCGLTITEEDLSSHYLAKHIENICACGKCGQILVKGRQLQEHAQRCGEPQDLTMNGLGNTEEKMDLEENPDEQSEIRDMFVEMLDDFRDNHYQINSIQKKQLFKHSACPFRCPNCGQRFETENLVVEHMSSCLDQDMFKSAIMEENERDHRRKHFCNLCGKGFYQRCHLREHYTVHTKEKQFVCQTCGKQFLRERQLRLHNDMHKGMARYVCSICDQGNFRKHDHVRHMISHLSAGETICQVCFQIFPNNEQLEQHMDVHLYTCGICGAKFNLRKDMRSHYNAKHLKRT

SEQ ID NO: 15857 - protein, 871 aa, Homo sapiens
MSFSEMNRRTLAFRGGGLVTASGGGSTNNNAGGEASAWPPQPQPRQPPPPAPPALQPPNGRGADEEVELEGLEPQDLEASAGPAAGAAEEAKELLLPQDAGGPTSLGGGAGGPLLAERNRRTLAFRGGGGGGLGNNGSSRGRPETSVWPLRHFNGRGPATVDLELDALEGKELMQDGASLSDSTEDEEEGASLGDGSGAEGGSCSSSRRSGGDGGDEVEGSGVGAGEGETVQHFPLARPKSLMQKLQCSFQTSWLKDFPWLRYSKDTGLMSCGWCQKTPADGGSVDLPPVGHDELSRGTRNYKKTLLLRHHVSTEHKLHEANAQESEIPSEEGYCDFNSRPNENSYCYQLLRQLNEQRKKGILCDVSIVVSGKIFKAHKNILVAGSRFFKTLYCFSNKESPNQNNTTHLDIAAVQGFSVILDFLYSGNLVLTSQNAIEVMTVASYLQMSEVVQTCRNFIKDALNISIKSEAPESVVVDYNNRKPVNRDGLSSSRDQKIASFWATRNLTNLASNVKIENDGCNVDEGQIENYQMNDSSWVQDGSPEMAENESEGQTKVFIWNNMGSQGIQETGKTRRKNQTTKRFIYNIPPNNETNLEDCSVMQPPVAYPEENTLLIKEEPDLDGALLSGPDGDRNVNANLLAEAGTSQDGGDAGTSHDFKYGLMPGPSNDFKYGLIPGTSNDFKYGLIPGASNDFKYGLLPESWPKQETWENGESSLIMNKLKCPHCSYVAKYRRTLKRHLLIHTGVRSFSCDICGKLFTRREHVKRHSLVHKKDKKYKCMVCKKIFMLAASVGIRHGSRRYGVCVDCADKSQPGGQEGVDQGQDTEFPRDEEYEENEVGEADEELVDDGEDQNDPSRWDESGEVCMSLDD

SEQ ID NO: 15858 - protein, 1053 aa, Homo sapiens
MSSEESYRAILRYLTNEREPYAPGTEGNVKRKIRKAAACYVVRGGTLYYQRRQRHRKTFAELEVVLQPERRRDLIEAAHLGPGGTHHTRHQTWHYLSKTYWWRGILKQVKDYIKQCSKCQEKLDRSRPISDVSEMLEELGLDLESGEESNESEDDLSNFTSSPTTASKPAKKKPVSKHELVFVDTKGVVKRSSPKHCQAVLKQLNEQRLSNQFCDVTLLIEGEEYKAHKSVLSANSEYFRDLFIEKGAVSSHEAVVDLSGFCKASFLPLLEFAYTSVLSFDFCSMADVAILARHLFMSEVLEICESVHKLMEEKQLTVYKKGEVQTVASTQDLRVQNGGTAPPVASSEGTTTSLPTELGDCEIVLLVNGELPEAEQNGEVGRQPEPQVSSEAESALSSVGCIADSHPEMESVDLITKNNQTELETSNNRENNTVSNIHPKLSKENVISSSPEDSGMGNDISAEDICAEDIPKHRQKVDQPLKDQENLVASTAKTDFGPDDDTYRSRLRQRSVNEGAYIRLHKGMEKKLQKRKAVPKSAVQQVAQKLVQRGKKMKQPKRDAKENTEEASHKCGECGMVFQRRYALIMHKLKHERARDYKCPLCKKQFQYSASLRAHLIRHTRKDAPSSSSSNSTSNEASGTSSEKGRTKREFICSICGRTLPKLYSLRIHMLKHTGVKPHACQVCGKTFIYKHGLKLHQSLHQSQKQFQCELCVKSFVTKRSLQEHMSIHTGESKYLCSVCGKSFHRGSGLSKHFKKHQPKPEVRGYHCTQCEKSFFEARDLRQHMNKHLGVKPFQCQFCDKCYSWKKDWYSHVKSHSVTEPYRCNICGKEFYEKALFRRHVKKATHGKKGRAKQNLERVCEKCGRKFTQLREYRRHMNNHEGVKPFECLTCGVAWADARSLKRHVRTHTGERPYVCPVCSEAYIDARTLRKHMTKFHRDYVPCKIMLEKDTLQFHNQGTQVAHAVSILTAGMQEQESSGPQELETVVVTGETMEALEAVAATEEYPSVSTLSDQSIMQVVNYVLAQQQGQKLSEVAEAIQTVKVEVAHISGGE

SEQ ID NO: 15859 - protein, 459 aa, Homo sapiens
MASGVEVLRFQLPGHEAATLRNMNQLRAEERFCDVTIVADSLKFRGHKVILAACSPFLRDQFLLNPSSELQVSLMHSARIVADLLLSCYTGALEFAVRDIVNYLTAASYLQMEHVVEKCRNALSQFIEPKIGLKEDGVSEASLVSSISATKSLLPPARTPKPAPKPPPPPPLPPPLLRPVKLEFPLDEDLELKAEEEDEDEDEDVSDICIVKVESALEVAHRLKPPGGLGGGLGIGGSVGGHLGELAQSSVPPSTVAPPQGVVKACYSLSEDAEGEGLLLIPGGRASVGATSGLVEAAAVAMAARGAGGSLGAGGSRGPLPGGFSGGNPLKNIKCTKCPEVFQGVEKLVFHMRAQHFIFMCPRCGKQFNHSSNLNRHMNVHRGVKSHSCGICGKCFTQKSTLHDHLNLHSGARPYRCSYCDVRFAHKPAIRRHLKEQHGKTTAENVLEASVAEINVLIR

SEQ ID NO: 15860 - protein, 449 aa, Homo sapiens
MEFFISMSETIKYNDDDHKTLFLKTLNEQRLEGEFCDIAIVVEDVKFRAHRCVLAACSTYFKKLFKKLEVDSSSVIEIDFLRSDIFEEVLNYMYTAKISVKKEDVNLMMSSGQILGIRFLDKLCSQKRDVSSPDENNGQSKSKYCLKINRPIGDAADTQDDDVEEIGDQDDSPSDDTVEGTPPSQEDGKSPTTTLRVQEAILKELGSEEVRKVNCYGQEVESMETPESKDLGSQTPQALTFNDGMSEVKDEQTPGWTTAASDMKFEYLLYGHHREQIACQACGKTFSDEGRLRKHEKLHTADRPFVCEMCTKGFTTQAHLKEHLKIHTGYKPYSCEVCGKSFIRAPDLKKHERVHSNERPFACHMCDKAFKHKSHLKDHERRHRGEKPFVCGSCTKAFAKASDLKRHENNMHSERKQVTPSAIQSETEQLQAAAMAAEAEQQLETIACS

SEQ ID NO: 15861 - protein, 673 aa, Homo sapiens; identical to SEQ ID NO: 15499

SEQ ID NO: 15862 - protein, 803 aa, Homo sapiens
MDFPQHSQHVLEQLNQQRQLGLLCDCTFVVDGVHFKAHKAVLAACSEYFKMLFVDQKDVVHLDISNAAGLGQVLEFMYTAKLSLSPENVDDVLAVATFLQMQDIITACHALKSLAEPATSPGGNAEALATEGGDKRAKEEKVATSTLSRLEQAGRSTPIGPSRDLKEERGGQAQSAASGAEQTEKADAPREPPPVELKPDPTSGMAAAEAEAALSESSEQEMEVEPARKGEEEQKEQEEQEEEGAGPAEVKEEGSQLENGEAPEENENEESAGTDSGQELGSEARGLRSGTYGDRTESKAYGSVIHKCEDCGKEFTHTGNFKRHIRIHTGEKPFSCRECSKAFSDPAACKAHEKTHSPLKPYGCEECGKSYRLISLLNLHKKRHSGEARYRCEDCGKLFTTSGNLKRHQLVHSGEKPYQCDYCGRSFSDPTSKMRHLETHDTDKEHKCPHCDKKFNQVGNLKAHLKIHIADGPLKCRECGKQFTTSGNLKRHLRIHSGEKPYVCIHCQRQFADPGALQRHVRIHTGEKPCQCVMCGKAFTQASSLIAHVRQHTGEKPYVCERCGKRFVQSSQLANHIRHHDNIRPHKCSVCSKAFVNVGDLSKHIIIHTGEKPYLCDKCGRGFNRVDNLRSHVKTVHQGKAGIKILEPEEGSEVSVVTVDDMVTLATEALAATAVTQLTVVPVGAAVTADETEVLKAEISKAVKQVQEEDPNTHILYACDSCGDKFLDANSLAQHVRIHTAQALVMFQTDADFYQQYGPGGTWPAGQVLQAGELVFRPRDGAEGQPALAETSPTAPECPPPAE

SEQ ID NO: 15863 - protein, 522 aa, Homo sapiens
MEFPDHSRHLLQCLSEQRHQGFLCDCTVLVGDAQFRAHRAVLASCSMYFHLFYKDQLDKRDIVHLNSDIVTAPAFALLLEFMYEGKLQFKDLPIEDVLAAASYLHMYDIVKVCKKKLKEKATTEADSTKKEEDASSCSDKVESLSDGSSHIAGDLPSDEDEGEDEKLNILPSKRDLAAEPGNMWMRLPSDSAGIPQAGGEAEPHATAAGKTVASPCSSTESLSQRSVTSVRDSADVDCVLDLSVKSSLSGVENLNSSYFSSQDVLRSNLVQVKVEKEASCDESDVGTNDYDMEHSTVKESVSTNNRVQYEPAHLAPLREDSVLRELDREDKASDDEMMTPESERVQVEGGMESSLLPYVSNILSPAGQIFMCPLCNKVFPSPHILQIHLSTHFREQDGIRSKPAADVNVPTCSLCGKTFSCMYTLKRHERTHSGEKPYTCTQCGKSFQYSHNLSRHAVVHTREKPHACKWCERRFTQSGDLYRHIRKFHCELVNSLSVKSEALSLPTVRDWTLEDSSQELWK

SEQ ID NO: 15864 - protein, 514 aa, Homo sapiens
MDLANHGLILLQQLNAQREFGFLCDCTVAIGDVYFKAHKSVLASFSNYFKMLFVHQTSECVRLKPTDIQPDIFSYLLHLMYTGKMAPQLIDPVRLEQGIKFLHAYPLIQEASLASQGAFSHPDQVFPLASSLYGIQIADHQLRQATKIASAPEKLGRDPRPQTSRISQEQVPEASQLSQLTSNLAQVNRTNMTPSDPLQTSLSPELVSTPVPPPPPGEETNLEASSSDEQPASLTIAHVKPSIMKRNGSFPKYYACHLCGRRFTLRSSLREHLQIHTGVPFTSSQQGESRVPLTLCSNAADLGKDAMEVPEAGMISDSELQHISDSPIIDGQQQSETPPPSDIADIDNLEQADQEREVKRRKYECTICGRKFIQKSHWREHMYIHTGKPFKCSTCDKSFCRANQAARHVCLNQSIDTYTMVDKQTLELCTFEEGSQMDNMLVQTNKPYKCNLCDKTFSTPNEVVKHSCQNQNSDVFALDEGRSILLGSGDSEVTEPDHPVLASIKKEQETVLLD

SEQ ID NO: 15865 - protein, 741 aa, Homo sapiens
MLERKKPKTAENQKASEENEITQPGGSSAKPGLPCLNFEAVLSPDPALIHSTHSLTNSHAHTGSSDCDISCKGMTERIHSINLHNFSNSVLETLNEQRNRGHFCDVTVRIHGSMLRAHRCVLAAGSPFFQDKLLLGYSDIEIPSVVSVQSVQKLIDFMYSGVLRVSQSEALQILTAASILQIKTVIDECTRIVSQNVGDVFPGIQDSGQDTPRGTPESGTSGQSSDTESGYLQSHPQHSVDRIYSALYACSMQNGSGERSFYSGAVVSHHETALGLPRDHHMEDPSWITRIHERSQQMERYLSTTPETTHCRKQPRPVRIQTLVGNIHIKQEMEDDYDYYGQQRVQILERNESEECTEDTDQAEGTESEPKGESFDSGVSSSIGTEPDSVEQQFGPGAARDSQAEPTQPEQAAEAPAEGGPQTNQLETGASSPERSNEVEMDSTVITVSNSSDKSVLQQPSVNTSIGQPLPSTQLYLRQTETLTSNLRMPLTLTSNTQVIGTAGNTYLPALFTTQPAGSGPKPFLFSLPQPLAGQQTQFVTVSQPGLSTFTAQLPAPQPLASSAGHSTASGQGEKKPYECTLCNKTFTAKQNYVKHMFVHTGEKPHQCSICWRSFSLKDYLIKHMVTHTGVRAYQCSICNKRFTQKSSLNVHMRLHRGEKSYECYICKKKFSHKTLLERHVALHSASNGTPPAGTPPGARAGPPGVVACTEGTTYVCSVCPAKFDQIEQFNDHMRMHVSDG

SEQ ID NO: 15866 - protein, 1066 aa, Homo sapiens
MEGLLHYINPAHAISLLSALNEERLKGQLCDVLLIVGDQKFRAHKNVLAASSEYFQSLFTNKENESQTVFQLDFCEPDAFDNVLNYIYSSSLFVEKSSLAAVQELGYSLGISFLTNIVSKTPQAPFPTCPNRKKVFVEDDENSSQKRSVIVCQSRNEAQGKTVSQNQPDVSHTSRPSPSIAVKANTNKPHVPKPIEPLHNLSLTEKSWPKDSSVVYAKSLEHSGSLDDPNRISLVKRNAVLPSKPLQDREAMDDKPGVSGQLPKGKALELALKRPRPPVLSVCSSSETPYLLKETNKGNGQGEDRNLLYYSKLGLVIPSSGSGSGNQSIDRSGPLVKSLLRRSLSMDSQVPVYSPSIDLKSSQGSSSVSSDAPGNVLCALSQKSSLKDCSEKTALDDRPQVLQPHRLRSFSASQSTDREGASPVTEVRIKTEPSSPLSDPSDIIRVTVGDAATTAAASSSSVTRDLSLKTEDDQKDMSRLPAKRRFQADRRLPFKKLKVNEHGSPVSEDNFEEGSSPTLLDADFPDSDLNKDEFGELEGTRPNKKFKCKHCLKIFRSTAGLHRHVNMYHNPEKPYACDICHKRFHTNFKVWTHCQTQHGIVKNPSPASSSHAVLDEKFQRKLIDIVREREIKKALIIKLRRGKPGFQGQSSSQAQQVIKRNLRSRAKGAYICTYCGKAYRFLSQFKQHIKMHPGEKPLGVNKVAKPKEHAPLASPVENKEVYQCRLCNAKLSSLLEQGSHERLCRNAAVCPYCSLRFFSPELKQEHESKCEYKKLTCLECMRTFKSSFSIWRHQVEVHNQNNMAPTENFSLPVLDHNGDVTGSSRPQSQPEPNKVNHIVTTKDDNVFSDSSEQVNFDSEDSSCLPEDLSLSKQLKIQVKEEPVEEAEEEAPEASTAPKEAGPSKEASLWPCEKCGKMFTVHKQLERHQELLCSVKPFICHVCNKAFRTNFRLWSHFQSHMSQASEESAHKESEVCPVPTNSPSPPPLPPPPPLPKIQPLEPDSPTGLSENPTPATEKLFVPQESDTLFYHAPPLSAITFKRQFMCKLCHRTFKTAFSLWSHEQTHN

SEQ ID NO: 15867 - protein, 634 aa, Homo sapiens
MEPSPLSPSGAALPLPLSLAPPPLPLPAAAVVHVSFPEVTSALLESLNQQRLQGQLCDVSIRVQGREFRAHRAVLAASSPYFHDQVLLKGMTSISLPSVMDPGAFETVLASAYTGRLSMAAADIVNFLTVGSVLQMWHIVDKCTELLREGRASATTTITTAAATSVTVPGAGVPSGSGGTVAPATMGSARSHASSRASENQSPSSSNYFSPRESTDFSSSSQEAFAASAVGSGERRGGGPVFPAPVVGSGGATSGKLLLEADELCDDGGDGRGAVVPGAGLRRPTYTPPSIMPQKHWVYVKRGGNCPAPTPLVPQDPDLEEEEEEEDLVLTCEDDEDEELGGSSRVPVGGGPEATLSISDVRTLSEPPDKGEEQVNFCESSNDFGPYEGGGPVAGLDDSGGPTPSSYAPSHPPRPLLPLDMQGNQILVFPSSSSSSSSQAPGQPPGNQAEHGAVTVGGTSVGSLGVPGSVGGVPGGTGSGDGNKIFLCHCGKAFSHKSMRDRHVNMHLNLRPFDCPVCNKKFKMKHHLTEHMKTHTGLKPYECGVCAKKFMWRDSFMRHRGHCERRHRLGGVGAVPGPGTPTGPSLPSKRESPGVGGGSGDEASAATPPSSRRVWSPPRVHKVEMGFGGGGGAN

SEQ ID NO: 15868 - protein, 697 aa, Homo sapiens
MAETSPEPSGQLVVHSDAHSDTVLASFEDQRKKGFLCDITLIVENVHFRAHKALLAASSEYFSMMFAEEGEIGQSIYMLEGMVADTFGILLEFIYTGYLHASEKSTEQILATAQFLKVYDLVKAYTDFQNNHSSPKPTTLNTAGAPVVVISNKKNDPPKRKRGRPKKVNTLQEEKSELAAEEEIQLRVNNSVQNRQNFVVKGDSGVLNEQIAAKEKEESEPTCEPSREEEMPVEKDENYDPKTEDGQASQSRYSKRRIWRSVKLKDYKLVGDQEDHGSAKRICGRRKRPGGPEARCKDCGKVFKYNHFLAIHQRSHTGERPFKCNECGKGFAQKHSLQVHTRMHTGERPYTCTVCSKALTTKHSLLEHMSLHSGQKSFTCDQCGKYFSQNRQLKSHYRVHTGHSLPECKDCHRKFMDVSQLKKHLRTHTGEKPFTCEICGKSFTAKSSLQTHIRIHRGEKPYSCGICGKSFSDSSAKRRHCILHTGKKPFSCPECNLQFARLDNLKAHLKIHSKEKHASDASSISGSSNTEEVRNILQLQPYQLSTSGEQEIQLLVTDSVHNINFMPGPSQGISIVTAESSQNMTADQAANLTLLTQQPEQLQNLILSAQQEQTEHIQSLNMIESQMGPSQTEPVHVITLSKETLEHLHAHQEQTEELHLATSTSDPAQHLQLTQEPGPPPPTHHVPQPTPLGQEQS

SEQ ID NO: 15869 - protein, 435 aa, Homo sapiens
MDTASHSLVLLQQLNMQREFGFLCDCTVAIGDVYFKAHRAVLAAFSNYFKMIFIHQTSECIKIQPTDIQPDIFSYLLHIMYTGKGPKQIVDHSRLEEGIRFLHADYLSHIATEMNQVFSPETVQSSNLYGIQISTTQKTVVKQGLEVKEAPSSNSGNRAAVQGDHPQLQLSLAIGLDDGTADQQRACPATQALEEHQKPPVSIKQERCDPESVISQSHPSPSSEVTGPTFTENSVKIHLCHYCGERFDSRSNLRQHLHTHVSGSLPFGVPASILESNDLGEVHPLNENSEALECRRLSSFIVKENEQQPDHTNRGTTEPLQISQVSLISKDTEPVELNCNFSFSRKRKMSCTICGHKFPRKSQLLEHMYTHKGKSYRYNRCQRFGNALAQRFQPYCDSWSDVSLKSSRLSQEHLDLPCALESELTQENVDTILVE

SEQ ID NO: 15870 - protein, 441 aa, Homo sapiens
MSERSDLLHFKFENYGDSMLQKMNKLREENKFCDVTVLIDDIEVQGHKIVFAAGSPFLRDQFLLNDSREVKISILQSSEVGRQLLLSCYSGVLEFPEMELVNYLTAASFLQMSHIVERCTQALWKFIKPKQPMDSKEGCEPQSASPQSKEQQGDARGSPKQDSPCIHPSEDSMDMEDSDIQIVKVESIGDVSEVRSKKDQNQFISSEPTALHSSEPQHSLINSTVENRVSEIEQNHLHNYALSYTGSDNIIMASKDVFGPNIRGVDKGLQWHHQCPKCTRVFRHLENYANHLKMHKLFMCLLCGKTFTQKGNLHRHMRVHAGIKPFQCKICGKTFSQKCSLQDHLNLHSGDKPHKCNYCDMVFAHKPVLRKHLKQLHGKNSFDNANERNVQDLTVDFDSFACTTVTDSKGCQPQPDATQVLDAGKLAQAVLNLRNDSTCVN

SEQ ID NO: 15871 - protein, 574 aa, Homo sapiens
MLREFSKWGVEASPGKAWERKRSLLRGAVGRYRGATGGDLFWAPFPSWGTMEFPEHSQQLLQSLREQRSQGFLCDCTVMVGSTQFLAHRAVLASCSPFFQLFYKERELDKRDLVCIHNEIVTAPAFGLLLDFMYAGQLTLRGDTPVEDVLAAASYLHMNDIVKVCKRRLQARALAEADSTKKEEETNSQLPSLEFLSSTSRGTQPSLASAETSGHWGKGEWKGSAAPSPTVRPPDEPPMSSGADTTQPGMEVDAPHLRAPHPPVADVSLASPSSSTETIPTNYFSSGISAVSLEPLPSLDVGPESLRVVEPKDPGGPLQGFYPPASAPTSAPAPVSAPVPSQAPAPAEAELVQVKVEAIVISDEETDVSDEQPQGPERAFPSGGAVYGAQPSQPEAFEDPGAAGLEEVGPSDHFLPTDPHLPYHLLPGAGQYHRGLVTSPLPAPASLHEPLYLSSEYEAAPGSFGVFTEDVPTCKTCGKTFSCSYTLRRHATVHTRERPYECRYCLRSYTQSGDLYRHIRKAHNEDLAKRSKPDPEVGPLLGVQPLPGSPTADRQSSSGGGPPKDFVLAPKTNI

SEQ ID NO: 15872 - protein, 487 aa, Homo sapiens
MSLPPIRLPSPYGSDRLVQLAARLRPALCDTLITVGSQEFPAHSLVLAGVSQQLGRRGQWALGEGISPSTFAQLLNFVYGESVELQPGELRPLQEAARALGVQSLEEACWRARGDRAKKPDPGLKKHQEEPEKPSRNPERELGDPGEKQKPEQVSRTGGREQEMLHKHSPPRGRPEMAGATQEAQQEQTRSKEKRLQAPVGQRGADGKHGVLTWLRENPGGSEESLRKLPGPLPPAGSLQTSVTPRPSWAEAPWLVGGQPALWSILLMPPRYGIPFYHSTPTTGAWQEVWREQRIPLSLNAPKGLWSQNQLASSSPTPGSLPQGPAQLSPGEMEESDQGHTGALATCAGHEDKAGCPPRPHPPPAPPARSRPYACSVCGKRFSLKHQMETHYRVHTGEKPFSCSLCPQRSRDFSAMTKHLRTHGAAPYRCSLCGAGCPSLASMQAHMRGHSPSQLPPGWTIRSTFLYSSSRPSRPSTSPCCPSSSTT

SEQ ID NO: 15873 - protein, 672 aa, Homo sapiens
MESRKLISATDIQYSGSLLNSLNEQRGHGLFCDVTVIVEDRKFRAHKNILSASSTYFHQLFSVAGQVVELSFIRAEIFAEILNYIYSSKIVRVRSDLLDELIKSGQLLGVKFIAELGVPLSQVKSISGTAQDGNTEPLPPDSGDKNLVIQKSKDEAQDNGATIMPIITESFSLSAEDYEMKKIIVTDSDDDDDDVIFCSEILPTKETLPSNNTVAQVQSNPGPVAISDVAPSASNNSPPLTNITPTQKLPTPVNQATLSQTQGSEKLLVSSAPTHLTPNIILLNQTPLSTPPNVSSSLPNHMPSSINLLVQNQQTPNSAILTGNKANEEEEEEIIDDDDDTISSSPDSAVSNTSLVPQADTSQNTSFDGSLIQKMQIPTLLQEPLSNSLKISDIITRNTNDPGVGSKHLMEGQKIITLDTATEIEGLSTGCKVYANIGEDTYDIVIPVKDDPDEGEARLENEIPKTSGSEMANKRMKVKHDDHYELIVDGRVYYICIVCKRSYVCLTSLRRHFNIHSWEKKYPCRYCEKVFPLAEYRTKHEIHHTGERRYQCLACGKSFINYQFMSSHIKSVHSQDPSGDSKLYRLHPCRSLQIRQYAYLSDRSSTIPAMKDDGIGYKVDTGKEPPVGTTTSTQNKPMTWEDIFIQQENDSIFKQNVTDGSTEFEFIIPESY

SEQ ID NO: 15874 - protein, 500 aa, Homo sapiens
MDSSSFIQFDVPEYSSTVLSQLNELRLQGKLCDIIVHIQGQPFRAHKAVLAASSPYFRDHSALSTMSGLSISVIKNPNVFEQLLSFCYTGRMSLQLKDVVSFLTAASFLQMQCVIDKCTQILESIHSKISVGDVDSVTVGAEENPESRNGVKDSSFFANPVEISPPYCSQGRQPTASSDLRMETTPSKALRSRLQEEGHSDRGSSGSVSEYEIQIEGDHEQGDLLVRESQITEVKVKMEKSDRPSCSDSSSLGDDGYHTEMVDGEQVVAVNVGSYGSVLQHAYSYSQAASQPTNVSEAFGSLSNSSPSRSMLSCFRGGRARQKRALSVHLHSDLQGLVQGSDSEAMMNNPGYESSPRERSARGHWYPYNERLICIYCGKSFNQKGSLDRHMRLHMGITPFVCKFCGKKYTRKDQLEYHIRGHTDDKPFRCEICGKCFPFQGTLNQHLRKNHPGVAEVRSRIESPERTDVYVEQKLENDASASEMGLDSRMEIHTVSDAPD

SEQ ID NO: 15875 - protein, 503 aa, Homo sapiens
MEKGGNIQLEIPDFSNSVLSHLNQLRMQGRLCDIVVNVQGQAFRAHKVVLAASSPYFRDHMSLNEMSTVSISVIKNPTVFEQLLSFCYTGRICLQLADIISYLTAASFLQMQHIIDKCTQILEGIHFKINVAEVEAELSQTRTKHQERPPESHRVTPNLNRSLSPRHNTPKGNRRGQVSAVLDIRELSPPEESTSPQIIEPSSDVESREPILRINRAGQWYVETGVADRGGRSDDEVRVLGAVHIKTENLEEWLGPENQPSGEDGSSAEEVTAMVIDTTGHGSVGQENYTLGSSGAKVARPTSSEVDRFSPSGSVVPLTERHRARSESPGRMDEPKQPSSQVEESAMMGVSGYVEYLREQEVSERWFRYNPRLTCIYCAKSFNQKGSLDRHMRLHMGITPFVCRMCGKKYTRKDQLEYHIRKHTGNKPFHCHVCGKSFPFQAILNQHFRKNHPGCIPLEGPHSISPETTVTSRGQAEEESPSQEETVAPGEAVQGSVSTTGPD

SEQ ID NO: 15876 - protein, 1195 aa, Homo sapiens
MTVMSLSRDLKDDFHSDTVLSILNEQRIRGILCDVTIIVEDTKFKAHSNVLAASSLYFKNIFWSHTICISSHVLELDDLKAEVFTEILNYIYSSTVVVKRQETVTDLAAAGKKLGISFLEDLTDRNFSNSPGPYVFCITEKGVVKEEKNEKRHEEPAITNGPRITNAFSIIETENSNNMFSPLDLRASFKKVSDSMRTASLCLERTDVCHEAEPVRTLAEHSYAVSSVAEAYRSQPVREHDGSSPGNTGKENCEALAAKPKTCRKPKTFSIPQDSDSATENIPPPPVSNLEVNQERSPQPAAVLTRSKSPNNEGDVHFSREDENQSSDVPGPPAAEVPPLVYNCSCCSKAFDSSTLLSAHMQLHKPTQEPLVCKYCNKQFTTLNRLDRHEQICMRSSHMPIPGGNQRFLENYPTIGQNGGSFTGPEPLLSENRIGEFSSTGSTLPDTDHMVKFVNGQMLYSCVVCKRSYVTLSSLRRHANVHSWRRTYPCHYCNKVFALAEYRTRHEIWHTGERRYQCIFCLETFMTYYILKNHQKSFHAIDHRLSISKKTANGGLKPSVYPYKLYRLLPMKCKRAPYKSYRNSSYENARENSQMNESAPGTYVVQNPHSSELPTLNFQDTVNTLTNSPAIPLETSACQDIPTSANVQNAEGTKWGEEALKMDLDNNFYSTEVSVSSTENAVSSDLRAGDVPVLSLSNSSENAASVISYSGSAPSVIVHSSQFSSVIMHSNAIAAMTSSNHRAFSDPAVSQSLKDDSKPEPDKVGRFASRPKSIKEKKKTTSHTRGEIPEESNYVADPGGSLSKTTNIAEETSKIETYIAKPALPGTSTNSNVAPLCQITVKIGNEAIVKRHILGSKLFYKRGRRPKYQMQEEPLPQGNDPEPSGDSPLGLCQSECMEMSEVFDDASDQDSTDKPWRPYYNYKPKKKSRQLKKMRKVNWRKEHGNRSPSHKCKYPAELDCAVGKAPQDKPFEEEETKEMPKLQCELCDGDKAVGAGNQGRPHRHLTSRPYACELCAKQFQSPSTLKMHMRCHTGEKPYQCKTCGRCFSVQGNLQKHERIHLGLKEFVCQYCNKAFTLNETLKIHERIHTGEKRYHCQFCFQRFLYLSTKRNHEQRHIREHNGKGYACFQCPKICKTAAALGMHQKKHLFKSPSQQEKIGDVCHENSNPLENQHFIGSEDNDQKDNIQTGVENVVL

SEQ ID NO: 15877 - protein, 712 aa, Homo sapiens
MGMRIKLQSTNHPNNLLKELNKCRLSETMCDVTIVVGSRSFPAHKAVLACAAGYFQNLFLNTGLDAARTYVVDFITPANFEKVLSFVYTSELFTDLINVGVIYEVAERLGMEDLLQACHSTFPDLESTARAKPLTSTSESHSGTLSCPSAEPAHPLGELRGGGDYLGADRNYVLPSDAGGSYKEEEKNVASDANHSLHLPQPPPPPPKTEDHDTPAPFTSIPSMMTQPLLGTVSTGIQTSTSSCQPYKVQSNGDFSKNSFLTPDNAVDITTGTNSCLSNSEHSKDPGFGQMDELQLEDLGDDDLQFEDPAEDIGTTEEVIELSDDSEDELAFGENDNRENKAMPCQVCKKVLEPNIQLIRQHARDHVDLLTGNCKVCETHFQDRNSRVTHVLSHIGIFLFSCDMCETKFFTQWQLTLHRRDGIFENNIIVHPNDPLPGKLGLFSGAASPELKCAACGKVLAKDFHVVRGHILDHLNLKGQACSVCDQRHLNLCSLMWHTLSHLGISVFSCSVCANSFVDWHLLEKHMAVHQSLEDALFHCRLCSQSFKSEAAYRYHVSQHKCNSGLDARPGFGLQHPALQKRKLPAEEFLGEELALQGQPGNSKYSCKVCGKRFAHTSEFNYHRRIHTGEKPYQCKVCHKFFRGRSTIKCHLKTHSGALMYRCTVCGHYSSTLNLMSKHVGVHKGSLPPDFTIEQTFMYIIHSKEADKNPDS

SEQ ID NO: 15878 - protein, 1013 aa, Homo sapiens
MPPPAEVTDPSHAPAVLRQLNEQRLRGLFCDVTLIAGDTKFPAHRSVLAASSPFFREALLTSAPLPLPPATGGAAPNPATTTAASSSSSSSSSSSSSSSSASSSSSSSSSSPPPASPPASSPPRVLELPGVPAAAFSDVLNFIYSARLALPGGGGDGAAVAEIGALGRRLGISRLQGLGEGGDAWVPPTPAPMATSQPEEDSFGPGPRPAGEWEGDRAEAQAPDLQCSLPRRPLPCPQCGKSFIHPKRLQTHEAQCRRGASTRGSTGLGAGGAGPGGPAGVDASALPPPVGFRGGPEHVVKVVGGHVLYVCAACERSYVTLSSLKRHSNVHSWRRKYPCRYCEKVFALAEYRTKHEVWHTGERRYQCIFCWETFVTYYNLKTHQRAFHGISPGLLASEKTPNGGYKPKLNTLKLYRLLPMRAAKRPYKTYSQGAPEAPLSPTLNTPAPVAMPASPPPGPPPAPEPGPPPSVITFAHPAPSVIVHGGSSSGGGGSGTASTGGSQAASVITYTAPPRPPKKREYPPPPPEPAATPTSPATAVSPATAAGPAMATTTEEAKGRNPRAGRTLTYTAKPVGGIGGGGGPPTGAGRGPSQLQAPPPLCQITVRIGEEAIVKRRISETDLRPGELSGEEMEESEEDEEEEDEEEEEEDEEESKAGGEDQLWRPYYSYKPKRKAGAAGGASVGGSGLPRGRRPPRWRQKLERRSWEETPAAESPAGRARTERRHRCGDCAQTFTTLRKLRKHQEAHGGGSHSSRAGRRPSTRFTCPHCAKVCKTAAALSRHGQRHAAERPGGTPTPVIAYSKGSAGTRPGDVKEEAPQEMQVSSSSGEAGGGSTAAEEASETASLQDPIISGGEEPPVVASGGSYVYPPVQEFPLALIGGGREPGGGRGKSGSEGPVGAGEGDRMEGIGAAKVTFYPEPYPLVYGPQLLAAYPYNFSNLAALPVALNMVLPDEKGAGALPFLPGVFGYAVNPQAAPPAPPTPPPPTLPPPIPPKGEGERAGVERTQKGDVG

SEQ ID NO: 15879 - protein, 1239 aa, Homo sapiens
MELPNYSRQLLQQLYTLCKEQQFCDCTISIGTIYFRAHKLVLAAASLLFKTLLDNTDTISIDASVVSPEEFALLLEMMYTGKLPVGKHNFSKIISLADSLQMFDVAVSCKNLLTSLVNCSVQGQVVRDVSAPSSETFRKEPEKPQVEILSSEGAGEPHSSPELAATPGGPVKAETEEAAHSVSQEMSVNSPTAQESQRNAETPAETPTTAEACSPSPAVQTFSEAKKTSTEPGCERKHYQLNFLLENEGVFSDALMVTQDVLKKLEMCSEIKGPQKEMIVKCFEGEGGHSAFQRILGKVREESLDVQTVVSLLRLYQYSNPAVKTALLDRKPEDVDTVQPKGSTEEGKTLSVLLLEHKEDLIQCVTQLRPIMESLETAKEEFLTGTEKRVILNCCEGRTPKETIENLLHRMTEEKTLTAEGLVKLLQAVKTTFPNLGLLLEKLQKSATLPSTTVQPSPDDYGTELLRRYHENLSEIFTDNQILLKMISHMTSLAPGEREVMEKLVKRDSGSGGFNSLISAVLEKQTLSATAIWQLLLVVQETKTCPLDLLMEEIRREPGADAFFRAVTTPEHATLETILRHNQLILEAIQQKIEYKLFTSEEEHLAETVKEILSIPSETASPEASLRAVLSRAMEKSVPAIEICHLLCSVHKSFPGLQPVMQELAYIGVLTKEDGEKETWKVSNKFHLEANNKEDEKAAKEDSQPGEQNDQGETGSLPGQQEKEASASPDPAKKSFICKACDKSFHFYCRLKVHMKRCRVAKSKQVQCKECSETKDSKKELDKHQLEAHGAGGEPDAPKKKKKRLPVTCDLCGREFAHASGMQYHKLTEHFDEKPFSCEECGAKFAANSTLKNHLRLHTGDRPFMCKHCLMTFTQASALAYHTKKKHSEGKMYACQYCDAVFAQSIELSRHVRTHTGDKPYVCRDCGKGFRQANGLSIHLHTFHNIEDPYDCKKCRMSFPTLQDHRKHIHEVHSKEYHPCPTCGKIFSAPSMLERHVVTHVGGKPFSCGICNKAYQQLSGLWYHNRTHHPDVFAAQNHRSSKFSSLQCSSCDKTFPNTIEHKKHIKAEHADMKFHECDQCKELFPTPALLQVHVKCQHSGSQPFRCLYCAATFRFPGALQHHVTTEHFKQSETTFPCELCGELFTSQAQLDSHLESEHPKVMSTETQAAASQMAQVIQTPEPVAPTEQVITLEETQLAGSQVFVTLPDSQASQASSELVAVTVEDLLDGTVTLICGEAK

SEQ ID NO: 15880 - protein, 909 aa, Homo sapiens
MKKRRKVTSNLEKIHLGYHKDSSEGNVAVECDQVTYTHSAGRPTPEALHCYQELPPSPDQRKLLSSLQYNKNLLKYLNDDRQKQPSFCDLLIIVEGKEFSAHKVVVAVGSSYFHACLSKNPSTDVVTLDHVTHSVFQHLLEFLYTSEFFVYKYEIPLVLEAAKFLDIIDAVKLLNNENVAPFHSELTEKSSPEETLNELTGRLSNNHQCKFCSRHFCYKKSLENHLAKTHRSLLLGKKHGLKMLERSFSARRSKRNRKCPVKFDDTSDDEQESGDGSDNLNQENFDKEKSDRNDSEDPGSEYNAEEDELEEEMSDEYSDIEEQSEKDHNDAEEEPEAGDSVGNVHEGLTPVVIQNSNKKILQCPKCDKTFDRIGKYESHTRVHTGEKPFECDICHQRYSTKSNLTVHRKKHSNETEFHKKEHKCPYCNKLHASKKTLAKHVKRFHPENAQEFISIKKTKSESWKCDICKKSFTRRPHLEEHMILHSQDKPFKCTYCEEHFKSRFARLKHQEKFHLGPFPCDICGRQFNDTGNLKRHIECTHGGKRKWTCFICGKSVRERTTLKEHLRIHSGEKPHLCSICGQSFRHGSSYRLHLRVHHDDKRYECDECGKTFIRHDHLTKHKKIHSGEKAHQCEECGKCFGRRDHLTVHYKSVHLGEKVWQKYKATFHQCDVCKKIFKGKSSLEMHFRTHSGEKPYKCQICNQSFRIKKTLTKHLVIHSDARPFNCQHCNATFKRKDKLKYHIDHVHEIKSPDDPLSTSEEKLVSLPVEYSSDDKIFQTETKQYMDQPKVYQSEAKTMLQNVSAEVCVPVTLVPVQMPDTPSDLVRHTTTLPPSSHEILSPQPQSTDYPRAADLAFLEKYTLTPQPANIVHPVRPEQMLDPREQSYLGTLLGLDSTTGVQNISTNEHHS

SEQ ID NO: 15881 - protein, 422 aa, Homo sapiens
MEFPEHGGRLLGRLRQQRELGFLCDCTVLVGDARFPAHRAVLAACSVYFHLFYRDRPAGSRDTVRLNGDIVTAPAFGRLLDFMYEGRLDLRSLPVEDVLAAASYLHMYDIVKVCKGRLQEKDRSLDPGNPAPGAEPAQPPCPWPVWTADLCPAARKAKLPPFGVKAALPPRASGPPPCQVPEESDQALDLSLKSGPRQERVHPPCVLQTPLCSQRQPGAQPLVKDERDSLSEQEESSSSRSPHSPPKPPPVPAAKGLVVGLQPLPLSGEGSRELELGAGRLASEDELGPGGPLCICPLCSKLFPSSHVLQLHLSAHFRERDSTRARLSPDGVAPTCPLCGKTFSCTYTLKRHERTHSGEKPYTCVQCGKSFQYSHNLSRHTVVHTREKPHACRWCERRFTQSGDLYRHVRKFHCGLVKSLLV

SEQ ID NO: 15882 - protein, 467 aa, Homo sapiens
MEPGTNSFRVEFPDFSSTILQKLNQQRQQGQLCDVSIVVQGHIFRAHKAVLAASSPYFCDQVLLKNSRRIVLPDVMNPRVFENILLSSYTGRLVMPAPEIVSYLTAASFLQMWHVVDKCTEVLEGNPTVLCQKLNHGSDHQSPSSSSYNGLVESFELGSGGHTDFPKAQELRDGENEEESTKDELSSQLTEHEYLPSNSSTEHDRLSTEMASQDGEEGASDSAEFHYTRPMYSKPSIMAHKRWIHVKPERLEQACEGMDVHATYDEHQVTESINTVQTEHTVQPSGVEEDFHIGEKKVEAEFDEQADESNYDEQVDFYGSSMEEFSGERSDGNLIGHRQEAALAAGYSENIEMVTGIKEEASHLGFSATDKLYPCQCGKSFTHKSQRDRHMSMHLGLRPYGCGVCGKKFKMKHHLVGHMKIHTGIKPYECNICAKRFMWRDSFHRHVTSCTKSYEAAKAEQNTTEAN

SEQ ID NO: 15883 - protein, 570 aa, Homo sapiens
MGVKTFTHSSSSHSQEMLGKLNMLRNDGHFCDITIRVQDKIFRAHKVVLAACSDFFRTKLVGQAEDENKNVLDLHHVTVTGFIPLLEYAYTATLSINTENIIDVLAAASYMQMFSVASTCSEFMKSSILWNTPNSQPEKGLDAGQENNSNCNFTSRDGSISPVSSECSVVERTIPVCRESRRKRKSYIVMSPESPVKCGTQTSSPQVLNSSASYSENRNQPVDSSLAFPWTFPFGIDRRIQPEKVKQAENTRTLELPGPSETGRRMADYVTCESTKTTLPLGTEEDVRVKVERLSDEEVHEEVSQPVSASQSSLSDQQTVPGSEQVQEDLLISPQSSSIGSVDEGVSEGLPTLQSTSSTNAPPDDDDRLENVQYPYQLYIAPSTSSTERPSPNGPDRPFQCPTCGVRFTRIQNLKQHMLIHSGIKPFQCDRCGKKFTRAYSLKMHRLKHEGKRCFRCQICSATFTSFGEYKHHMRVSRHIIRKPRIYECKTCGAMLTNSGNLIVHLRSLNHEASELANYFQSSDFLVPDYLNQEQEETLVQYDLGEHGFESNSSVQMPVISQYHSKGKEP

SEQ ID NO: 15884 - protein, 511 aa, Homo sapiens
MAAAEAVHHIHLQNFSRSLLETLNGQRLGGHFCDVTVRIREASLRAHRCVLAAGSPFFQDKLLLGHSEIRVPPVVPAQTVRQLVEFLYSGSLVVAQGEALQVLTAASVLRIQTVIDECTQIIARARAPGTSAPTPLPTPVPPPLAPAQLRHRLRHLLAARPPGHPGAAHSRKQRQPARLQLPAPPTPAKAEGPDADPSLSAAPDDRGDEDDEESDDETDGEDGEGGGPGEGQAPPSFPDCAAGFLTAAADSACEEPPAPTGLADYSGAGRDFLRGAGSAEDVFPDSYVSTWHDEDGAVPEGCPTETPVQPDCILSGSRPPGVKTPGPPVALFPFHLGAPGPPAPPPSAPSGPAPAPPPAFYPTLQPEAAPSTQLGEVPAPSAAPTTAPSGTPARTPGAEPPTYECSHCRKTFSSRKNYTKHMFIHSGEKPHQCAVCWRSFSLRDYLLKHMVTHTGVRAFQCAVCAKRFTQKSSLNVHMRTHRPERAPCPACGKVFSHRALLERHLAAHPAP

SEQ ID NO: 15885 - protein, 589 aa, Homo sapiens
MNNRKEDMEITSHYRHLLRELNEQRQHGVLCDVCVVVEGKVFKAHKNVLLGSSRYFKTLYCQVQKTSEQATVTHLDIVTAQGFKAIIDFMYSAHLALTSRNVIEVMSAASFLQMTDIVQACHDFIKAALDISIKSDASDELAEFEIGASSSSSTEALISAVMAGRSISPWLARRTSPANSSGDSAIASCHDGGSSYGKEDQEPKADGPDDVSSQPLWPGDVGYGPLRIKEEQVSPSQYGGSELPSAKDGAVQNSFSEQSAGDAWQPTGRRKNRKNKETVRHITQQVEDDSRASSPVPSFLPTSGWPFSSRDSNADLSVTEASSSDSRGERAELYAQVEEGLLGGEASYLGPPLTPEKDDALHQATAVANLRAALMSKNSLLSLKADVLGDDGSLLFEYLPRGAHSLSLNEFTVIRKKFKCPYCSFSAMHQCILKRHMRSHTGERPYPCEICGKKFTRREHMKRHTLVHSKDKKYVCKVCSRVFMSAASVGIRHGSRRHGVCTDCAGRGMAGPLDHGGGGGEGSPEALFPGDGPYLEDPEDPRGEAEELGEDDEGLAPEDALLADDKDEEDSPRPRSPPGGPDKDFAWLS

SEQ ID NO: 15886 - protein, 747 aa, Homo sapiens
MGRLNEQRLFQPDLCDVDLVLVPQRSVFPAHKGVLAAYSQFFHSLFTQNKQLQRVELSLEALAPGGLQQILNFIYTSKLLVNAANVHEVLSAASLLQMADIAASCQELLDARSLGPPGPGTVALAQPAASCTPAAPPYYCDIKQEADTPGLPKIYAREGPDPYSVRVEDGAGTAGGTVPATIGPAQPFFKEEKEGGVEEAGGPPASLCKLEGGEELEEELGGSGTYSRREQSQIIVEVNLNNQTLHVSTGPEGKPGAGPSPATVVLGREDGLQRHSDEEEEDDEEEEEEEEEEEGGGSGREEEEEEEGGSQGEEEEEEEDGHSEQEEEEEEEEEEGPSEQDQESSEEEEGEEGEAGGKQGPRGSRSSRADPPPHSHMATRSRENARRRGTPEPEEAGRRGGKRPKPPPGVASASARGPPATDGLGAKVKLEEKQHHPCQKCPRVFNNRWYLEKHMNVTHSRMQICDQCGKRFLLESELLLHRQTDCERNIQCVTCGKAFKKLWSLHEHNKIVHGYAEKKFSCEICEKKFYTMAHVRKHMVAHTKDMPFTCETCGKSFKRSMSLKVHSLQHSGEKPFRCENCNERFQYKYQLRSHMSIHIGHKQFMCQWCGKDFNMKQYFDEHMKTHTGEKPYICEICGKSFTSRPNMKRHRRTHTGEKPYPCDVCGQRFRFSNMLKAHKEKCFRVSHTLAGDGVPAAPGLPPTQPQAHALPLLPGLPQTLPPPPHLPPPPPLFPTTASPGGRMNANN

SEQ ID NO: 15887 - protein, 688 aa, Homo sapiens
MDGSFVQHSVRVLQELNKQREKGQYCDATLDVGGLVFKAHWSVLACCSHFFQSLYGDGSGGSVVLPAGFAEIFGLLLDFFYTGHLALTSGNRDQVLLAARELRVPEAVELCQSFKPKTSVGQAAGGQSGLGPPASQNVNSHVKEPAGLEEEEVSRTLGLVPRDQEPRGSHSPQRPQLHSPAQSEGPSSLCGKLKQALKPCPLEDKKPEDCKVPPRPLEAEGAQLQGGSNEWEVVVQVEDDGDGDYMSEPEAVLTRRKSNVIRKPCAAEPALSAGSLAAEPAENRKGTAVPVECPTCHKKFLSKYYLKVHNRKHTGEKPFECPKCGKCYFRKENLLEHEARNCMNRSEQVFTCSVCQETFRRRMELRVHMVSHTGEMPYKCSSCSQQFMQKKDLQSHMIKLHGAPKPHACPTCAKCFLSRTELQLHEAFKHRGEKLFVCEECGHRASSRNGLQMHIKAKHRNERPHVCEFCSHAFTQKANLNMHLRTHTGEKPFQCHLCGKTFRTQASLDKHNRTHTGERPFSCEFCEQRFTEKGPLLRHVASRHQEGRPHFCQICGKTFKAVEQLRVHVRRHKGVRKFECTECGYKFTRQAHLRRHMEIHDRVENYNPRQRKLRNLIIEDEKMVVVALQPPAELEVGSAEVIVESLAQGGLASQLPGQRLCAEESFTGPGVLEPSLIITAAVPEDCDT

SEQ ID NO: 15888 - protein, 765 aa, Homo sapiens
MDPVATHSCHLLQQLHEQRIQGLLCDCMLVVKGVCFKAHKNVLAAFSQYFRSLFQNSSSQKNDVFHLDVKNVSGIGQILDFMYTSHLDLNQDNIQVMLDTAQCLQVQNVLSLCHTFLKSATVVQPPGMPCNSTLSLQSTLTPDATCVISENYPPHLLQECSADAQQNKTLDESHPHASPSVNRHHSAGEISKQAPDTSDGSCTELPFKQPNYYYKLRNFYSKQYHKHAAGPSQERVVEQPFAFSTSTDLTTVESQPCAVSHSECILESPEHLPSNFLAQPVNDSAPHPESDATCQQPVKQMRLKKAIHLKKLNFLKSQKYAEQVSEPKSDDGLTKRLESASKNTLEKASSQSAEEKESEEVVSCENFNCISETERPEDPAALEDQSQTLQSQRQYACELCGKPFKHPSNLELHKRSHTGEKPFECNICGKHFSQAGNLQTHLRRHSGEKPYICEICGKRFAASGDVQRHIIIHSGEKPHLCDICGRGFSNFSNLKEHKKTHTADKVFTCDECGKSFNMQRKLVKHRIRHTGERPYSCSACGKCFGGSGDLRRHVRTHTGEKPYTCEICNKCFTRSAVLRRHKKMHCKAGDESPDVLEELSQAIETSDLEKSQSSDSFSQDTSVTLMPVSVKLPVHPVENSVAEFDSHSGGSYCKLRSMIQPHGVSDQEKLSLDPGKLAKPQMQQTQPQAYAYSDVDTPAGGEPLQADGMAMIRSSLAALDNHGGDPLGSRASSTTYRNSEGQFFSSMTLWGLAMKTLQNENELDQ

SEQ ID NO: 15889 - protein, 677 aa, Homo sapiens
MDFPGHFEQIFQQLNYQRLHGQLCDCVIVVGNRHFKAHRSVLAACSTHFRALFSVAEGDQTMNMIQLDSEVVTAEAFAALIDMMYTSTLMLGESNVMDVLLAASHLHLNSVVKACKHYLTTRTLPMSPPSERVQEQSARMQRSFMLQQLGLSIVSSALNSSQNGEEQPAPMSSSMRSNLDQRTPFPMRRLHKRKQSAEERARQRLRPSIDESAISDVTPENGPSGVHSREEFFSPDSLKIVDNPKADGMTDNQEDSAIMFDQSFGTQEDAQVPSQSDNSAGNMAQLSMASRATQVETSFDQEAAPEKSSFQCENPEVGLGEKEHMRVVVKSEPLSSPEPQDEVSDVTSQAEGSESVEVEGVVVSAEKIDLSPESSDRSFSDPQSSTDRVGDIHILEVTNNLEHKSTFSISNFLNKSRGNNFTANQNNDDNIPNTTSDCRLESEAPYLLSPEAGPAGGPSSAPGSHVENPFSEPADSHFVRPMQEVMGLPCVQTSGYQGGEQFGMDFSRSGLGLHSSFSRVMIGSPRGGASNFPYYRRIAPKMPVVTSVRSSQIPENSTSSQLMMNGATSSFENGHPSQPGPPQLTRASADVLSKCKKALSEHNVLVVEGARKYACKICCKTFLTLTDCKKHIRVHTGEKPYACLKCGKRFSQSSHLYKHSKTTCLRWQSSNLPSTLL

SEQ ID NO: 15890 - protein, 424 aa, Homo sapiens
MAAESDVLHFQFEQQGDVVLQKMNLLRQQNLFCDVSIYINDTEFQGHKVILAACSTFMRDQFLLTQSKHVRITILQSAEVGRKLLLSCYTGALEVKRKELLKYLTAASYLQMVHIVEKCTEALSKYLEIDLSMKNNNQHTDLCQSSDPDVKNEDENSDKDCEIIEISEDSPVNIDFHVKEEESNALQSTVESLTSERKEMKSPELSTVDIGFKDNEICILHVESISTAGVENGQFSQPCTSSKASMYFSETQHSLINSTVESRVAEVPGNQDQGLFCENTEGSYGTVSEIQNLEEGYSLRHQCPRCPRGFLHVENYLRHLKMHKLFLCLQCGKTFTQKKNLNRHIRGHMGIRPFQCTVCLKTFTAKSTLQDHLNIHSGDRPYKCHCCDMDFKHKSALKKHLTSVHGRSSGEKLSRPDLKRQSLL

SEQ ID NO: 15891 - protein, 584 aa, Homo sapiens
MAGGVDGPIGIPFPDHSSDILSGLNEQRTQGLLCDVVILVEGREFPTHRSVLAACSQYFKKLFTSGAVVDQQNVYEIDFVSAEALTALMDFAYTATLTVSTANVGDILSAARLLEIPAVSHVCADLLDRQILAADAGADAGQLDLVDQIDQRNLLRAKEYLEFFQSNPMNSLPPAAAAAAASFPWSAFGASDDDLDATKEAVAAAVAAVAAGDCNGLDFYGPGPPAERPPTGDGDEGDSNPGLWPERDEDAPTGGLFPPPVAPPAATQNGHYGRGGEEEAASLSEAAPEPGDSPGFLSGAAEGEDGDGPDVDGLAASTLLQQMMSSVGRAGAAAGDSDEESRADDKGVMDYYLKYFSGAHDGDVYPAWSQKVEKKIRAKAFQKCPICEKVIQGAGKLPRHIRTHTGEKPYECNICKVRFTRQDKLKVHMRKHTGEKPYLCQQCGAAFAHNYDLKNHMRVHTGLRPYQCDSCCKTFVRSDHLHRHLKKDGCNGVPSRRGRKPRVRGGAPDPSPGATATPGAPAQPSSPDARRNGQEKHFKDEDEDEDVASPDGLGRLNVAGAGGGGDSGGGPGAATDGNFTAGLA

SEQ ID NO: 15892 - protein, 539 aa, Homo sapiens; identical to SEQ ID NO: 15784

SEQ ID NO: 15893 - protein, 619 aa, Homo sapiens
MANDIDELIGIPFPNHSSEVLCSLNEQRHDGLLCDVLLVVQEQEYRTHRSVLAACSKYFKKLFTAGTLASQPYVYEIDFVQPEALAAILEFAYTSTLTITAGNVKHILNAARMLEIQCIVNVCLEIMEPGGDGGEEDDKEDDDDDEDDDDEEDEEEEEEEEEDDDDDTEDFADQENLPDPQDISCHQSPSKTDHLTEKAYSDTPRDFPDSFQAGSPGHLGVIRDFSIESLLRENLYPKANIPDRRPSLSPFAPDFFPHLWPGDFGAFAQLPEQPMDSGPLDLVIKNRKIKEEEKEELPPPPPPPFPNDFFKDMFPDLPGGPLGPIKAENDYGAYLNFLSATHLGGLFPPWPLVEERKLKPKASQQCPICHKVIMGAGKLPRHMRTHTGEKPYMCTICEVRFTRQDKLKIHMRKHTGERPYLCIHCNAKFVHNYDLKNHMRIHTGVRPYQCEFCYKSFTRSDHLHRHIKRQSCRMARPRRGRKPAAWRAASLLFGPGGPAPDKAAFVMPPALGEVGGHLGGAAVCLPGPSPAKHFLAAPKGALSLQELERQFEETQMKLFGRAQLEAERNAGGLLAFALAENVAAARPYFPLPDPWAAGLAGLPGLAGLNHVASMSEANN

SEQ ID NO: 15894 - protein, 441 aa, Homo sapiens
MEISSHQSHLLQQLNEQRRQDVFCDCSILVEGKVFKAHRNVLFASSGYFKMLLSQNSKETSQPTTATFQAFSPDTFTVILDFVYSGKLSLTGQNVIEVMSAASFLQMTDVISVCKTFIKSSLDISEKEKDRYFSLSDKDANSNGVERSSFYSGGWQEGSSSPRSHLSPEQGTGIISGKSWNKYNYHPASQKNTQQPLAKHEPRKESIKKTKHLRLSQPSEVTHYKSSKREVRTSDSSSHVSQSEEQAQIDAEMDSTPVGYQYGQGSDVTSKSFPDDLPRMRFKCPYCTHVVKRKADLKRHLRCHTGERPYPCQACGKRFSRLDHLSSHFRTIHQACKLICRKCKRHVTDLTGQVVQEGTRRYRLCNECLAEFGIDSLPIDLEAEQHLMSPSDGDKDSRWHLSEDENRSYVEIVEDGSGDLVIQQVDDSEEEEEKEIKPNIR

SEQ ID NO: 15895 - protein, 473 aa, Homo sapiens
METPTPLPPVPASPTCNPAPRTIQIEFPQHSSSLLESLNRHRLEGKFCDVSLLVQGRELRAHKAVLAAASPYFHDKLLLGDAPRLTLPSVIEADAFEGLLQLIYSGRLRLPLDALPAHLLVASGLQMWQVVDQCSEILRELETSGGGISARGGNSYHALLSTTSSTGGWCIRSSPFQTPVQSSASTESPASTESPVGGEGSELGEVLQIQVEEEEEEEEDDDDEDQGSATLSQTPQPQRVSGVFPRPHGPHPLPMTATPRKLPEGESAPLELPAPPALPPKIFYIKQEPFEPKEEISGSGTQPGGAKEETKVFSGGDTEGNGELGFLLPSGPGPTSGGGGPSWKPVDLHGNEILSGGGGPGGAGQAVHGPVKLGGTPPADGKRFGCLCGKRFAVKPKRDRHIMLTFSLRPFGCGICNKRFKLKHHLTEHMKTHAGALHACPHCGRRFRVHACFLRHRDLCKGQGWATAHWTYK

SEQ ID NO: 15896 - protein, 434 aa, Homo sapiens
MPDRDSYANGTGSSGGGPGGGGSEEASGAGVGSGGASSDAICRDFLRNVCKRGKRCRYRHPDMSEVSNLGVSKNEFIFCHDFQNKECSRPNCRFIHGSKEDEDGYKKTGELPPRLRQKVAAGLGLSPADLPNGKEEVPICRDFLKGDCQRGAKCKFRHLQRDFEFDARGGGGTGGGSTGSVLPGRRHDLYDIYDLPDRGFEDHEPGPKRRRGGCCPPDGPHFESYEYSLAPPRGVECRLLEEENAMLRKRVEELKKQVSNLLATNEVLLEQNAQFRNQAKVITLSSTAPATEQTLAPTVGTVATFNHGIAQTHTTLSSQALQPRPVSQQELVAPAGAPAAPPTNAAPPAAPPPPPPHLTPEITPLSAALAQTIAQGMAPPPVSMAPVAVSVAPVAPVAVSMAQPLAGITMSHTTTPMVTYPIASQSMRITAMPH

SEQ ID NO: 15897 - protein, 810 aa, Homo sapiens
MPNQGEDCYFFFYSTCTKGDSCPFRHCEAAIGNETVCTLWQEGRCFRQVCRFRHMEIDKKRSEIPCYWENQPTGCQKLNCAFHHNRGRYVDGLFLPPSKTVLPTVPESPEEEVKASQLSVQQNKLSVQSNPSPQLRSVMKVESSENVPSPTHPPVVINAADDDEDDDDQFSEEGDETKTPTLQPTPEVHNGLRVTSVRKPAVNIKQGECLNFGIKTLEEIKSKKMKEKSKKQGEGSSGVSSLLLHPEPVPGPEKENVRTVVRTVTLSTKQGEEPLVRLSLTERLGKRKFSAGGDSDPPLKRSLAQRLGKKVEAPETNIDKTPKKAQVSKSLKERLGMSADPDNEDATDKVNKVGEIHVKTLEEILLERASQKRGELQTKLKTEGPSKTDDSTSGARSSSTIRIKTFSEVLAEKKHRQQEAERQKSKKDTTCIKLKIDSEIKKTVVLPPIVASRGQSEEPAGKTKSMQEVHIKTLEEIKLEKALRVQQSSESSTSSPSQHEATPGARRLLRITKRTGMKEEKNLQEGNEVDSQSSIRTEAKEASGETTGVDITKIQVKRCETMREKHMQKQQEREKSVLTPLRGDVASCNTQVAEKPVLTAVPGITRHLTKRLPTKSSQKVEVETSGIGDSLLNVKCAAQTLEKRGKAKPKVNVKPSVVKVVSSPKLAPKRKAVEMHAAVIAAVKPLSSSSVLQEPPAKKAAVAVVPLVSEDKSVTVPEAENPRDSLVLPPTQSSSDSSPPEVSGPSSSQMSMKTRRLSSASTGKPPLSVEDDFEKLIWEISGGKLEAEIDLDPGKDEDDLLLELSEMIDS

SEQ ID NO: 15898 - protein, 599 aa, Homo sapiens
MSGPCGEKPVLEASPTMSLWEFEDSHSRQGTPRPGQELAAEEASALELQMKVDFFRKLGYSSTEIHSVLQKLGVQADTNTVLGELVKHGTATERERQTSPDPCPQLPLVPRGGGTPKAPNLEPPLPEEEKEGSDLRPVVIDGSNVAMSHGNKEVFSCRGILLAVNWFLERGHTDITVFVPSWRKEQPRPDVPITDQHILRELEKKKILVFTPSRRVGGKRVVCYDDRFIVKLAYESDGIVVSNDTYRDLQGERQEWKRFIEERLLMYSFVNDKFMPPDDPLGRHGPSLDNFLRKKPLTLEHRKQPCPYGRKCTYGIKCRFFHPERPSCPQRSVADELRANALLSPPRAPSKDKNGRRPSPSSQSSSLLTESEQCSLDGKKLGAQASPGSRQEGLTQTYAPSGRSLAPSGGSGSSFGPTDWLPQTLDSLPYVSQDCLDSGIGSLESQMSELWGVRGGGPGEPGPPRAPYTGYSPYGSELPATAAFSAFGRAMGAGHFSVPADYPPAPPAFPPREYWSEPYPLPPPTSVLQEPPVQSPGAGRSPWGRAGSLAKEQASVYTKLCGVFPPHLVEAVMGRFPQLLDPQQLAAEILSYKSQHPSE

SEQ ID NO: 15899 - protein, 836 aa, Homo sapiens
MTATAEVETPKMEKSASKEEKQQPKQDSTEQGNADSEEWMSSESDPEQISLKSSDNSKSCQPRDGQLKKKEMHSKPHRQLCRSPCLDRPSFSQSSILQDGKLDLEKEYQAKMEFALKLGYAEEQIQSVLNKLGPESLINDVLAELVRLGNKGDSEGQINLSLLVPRGPSSREIASPELSLEDEIDNSDNLRPVVIDGSNVAMSHGNKEEFSCRGIQLAVDWFLDKGHKDITVFVPAWRKEQSRPDAPITDQDILRKLEKEKILVFTPSRRVQGRRVVCYDDRFIVKLAFDSDGIIVSNDNYRDLQVEKPEWKKFIEERLLMYSFVNDKFMPPDDPLGRHGPSLENFLRKRPIVPEHKKQPCPYGKKCTYGHKCKYYHPERANQPQRSVADELRISAKLSTVKTMSEGTLAKCGTGMSSAKGEITSEVKRVAPKRQSDPSIRSVAMEPEEWLSIARKPEASSVPSLVTALSVPTIPPPKSHAVGALNTRSASSPVPGSSHFPHQKASLEHMASMQYPPILVTNSHGTPISYAEQYPKFESMGDHGYYSMLGDFSKLNINSMHNREYYMAEVDRGVYARNPNLCSDSRVSHTRNDNYSSYNNVYLAVADTHPEGNLKLHRSASQNRLQPFPHGYHEALTRVQSYGPEDSKQGPHKQSVPHLALHAQHPSTGTRSSCPADYPMPPNIHPGATPQPGRALVMTRMDSISDSRLYESNPVRQRRPPLCREQHASWDPLPCTTDSYGYHSYPLSNSLMQPCYEPVMVRSVPEKMEQLWRNPWVGMCNDSREHMIPEHQYQTYKNLCNIFPSNIVLAVMEKNPHTADAQQLAALIVAKLRAAR

SEQ ID NO: 15900 - protein, 1668 aa, Homo sapiens
MSKIRRKVTVENTKTISDSTSRRPSVFERLGPSTGSTAETQCRNWLKTGNCLYGNTCRFVHGPSPRGKGYSSNYRRSPERPTGDLRERMKNKRQDVDTEPQKRNTEESSSPVRKESSRGRHREKEDIKITKERTPESEEENVEWETNRDDSDNGDINYDYVHELSLEMKRQKIQRELMKLEQENMEKREEIIIKKEVSPEVVRSKLSPSPSLRKSSKSPKRKSSPKSSSASKKDRKTSAVSSPLLDQQRNSKTNQSKKKGPRTPSPPPPIPEDIALGKKYKEKYKVKDRIEEKTRDGKDRGRDFERQREKRDKPRSTSPAGQHHSPISSRHHSSSSQSGSSIQRHSPSPRRKRTPSPSYQRTLTPPLRRSASPYPSHSLSSPQRKQSPPRHRSPMREKGRHDHERTSQSHDRRHERREDTRGKRDREKDSREEREYEQDQSSSRDHRDDREPRDGRDRRDARDTRDRRELRDSRDMRDSREMRDYSRDTKESRDPRDSRSTRDAHDYRDREGRDTHRKEDTYPEESRSYGRNHLREESSRTEIRNESRNESRSEIRNDRMGRSRGRVPELPEKGSRGSRGSQIDSHSSNSNYHDSWETRSSYPERDRYPERDNRDQARDSSFERRHGERDRRDNRERDQRPSSPIRHQGRNDELERDERREERRVDRVDDRRDERARERDRERERDRERERERERERDREREKERELERERAREREREREKERDRERDRDRDHDRERERERERDREKEREREREERERERERERERERERERERERARERDKERERQRDWEDKDKGRDDRREKREEIREDRNPRDGHDERKSKKRYRNEGSPSPRQSPKRRREHSPDSDAYNSGDDKNEKHRLLSQVVRPQESRSLSPSHLTEDRQGRWKEEDRKPERKESSRRYEEQELKEKVSSVDKQREQTEILESSRMRAQDIIGHHQSEDRETSDRAHDENKKKAKIQKKPIKKKKEDDVGIERGNIETTSEDGQVFSPKKGQKKKSIEKKRKKSKGDSDISDEEAAQQSKKKRGPRTPPITTKEELVEMCNGKNGILEDSQKKEDTAFSDWSDEDVPDRTEVTEAEHTATATTPGSTPSPLSSLLPPPPPVATATATTVPATLAATTAAAATSFSTSAITISTSATPTNTTNNTFANEDSHRKCHRTRVEKVETPHVTIEDAQHRKPMDQKRSSSLGSNRSNRSHTSGRLRSPSNDSAHRSGDDQSGRKRVLHSGSRDREKTKSLEITGERKSRIDQLKRGEPSRSTSSDRQDSRSHSSRRSSPESDRQVHSRSGSFDSRDRLQERDRYEHDRERERERRDTRQREWDRDADKDWPRNRDRDRLRERERERERDKRRDLDRERERLISDSVERDRDRDRDRTFESSQIESVKRCEAKLEGEHERDLESTSRDSLALDKERMDKDLGSVQGFEETNKSERTESLEGDDESKLDDAHSLGSGAGEGYEPISDDELDEILAGDAEKREDQQDEEKMPDPLDVIDVDWSGLMPKHPKEPREPGAALLKFTPGAVMLRVGISKKLAGSELFAKVKETCQRLLEKPKDADNLFEHELGALNMAALLRKEERASLLSNLGPCCKALCFRRDSAIRKQLVKNEKGTIKQAYTSAPMVDNELLRLSLRLFKRKTTCHAPGHEKTEDNKLSQSSIQQELCVS

SEQ ID NO: 15901 - protein, 736 aa, Homo sapiens
MEIGTEISRKIRSAIKGKLQELGAYVDEELPDYIMVMVANKKSQDQMTEDLSLFLGNNTIRFTVWLHGVLDKLRSVTTEPSSLKSSDTNIFDSNVPSNKSNFSRGDERRHEAAVPPLAIPSARPEKRDSRVSTSSQESKTTNVRQTYDDGAATRLMSTVKPLREPAPSEDVIDIKPEPDDLIDEDLNFVQENPLSQKKPTVTLTYGSSRPSIEIYRPPASRNADSGVHLNRLQFQQQQNSIHAAKQLDMQSSWVYETGRLCEPEVLNSLEETYSPFFRNNSEKMSMEDENFRKRKLPVVSSVVKVKKFNHDGEEEEEDDDYGSRTGSISSSVSVPAKPERRPSLPPSKQANKNLILKAISEAQESVTKTTNYSTVPQKQTLPVAPRTRTSQEELLAEVVQGQSRTPRISPPIKEEETKGDSVEKNQGTQQRQLLSRLQIDPVMAETLQMSQDYYDMESMVHADTRSFILKKPKLSEEVVVAPNQESGMKTADSLRVLSGHLMQTRDLVQPDKPASPKFIVTLDGVPSPPGYMSDQEEDMCFEGMKPVNQTAASNKGLRGLLHPQQLHLLSRQLEDPNGSFSNAEMSELSVAQKPEKLLERCKYWPACKNGDECAYHHPISPCKAFPNCKFAEKCLFVHPNCKYDAKCTKPDCPFTHVSRRIPVLSPKPAVAPPAPPSSSQLCRYFPACKKMECPFYHPKHCRFNTQCTRPDCTFYHPTINVPPRHALKWIRPQTSE

SEQ ID NO: 15902 - protein, 426 aa, Homo sapiens
MPPKKQAQAGGSKKAEQKKKEKIIEDKTFGLKNKKGAKQQKFIKAVTHQVKFGQQNPRQVAQSEAEKKLKKDDKKKELQELNELFKPVVAAQKISKGADPKSVVCAFFKQGQCTKGDKCKFSHDLTLERKCEKRSVYIDARDEELEKDTMDNWDEKKLEEVVNKKHGEAEKKKPKTQIVCKHFLEAIENNKYGWFWVCPGGGDICMYRHALPPGFVLKKDKKKEEKEDEISLEDLIERERSALGPNVTKITLESFLAWKKRKRQEKIDKLEQDMERRKADFKAGKALVISGREVFEFRPELVNDDDEEADDTRYTQGTGGDEVDDSVSVNDIDLSLYIPRDVDETGITVASLERFSTYTSDKDENKLSEASGGRAENGERSDLEEDNEREGTENGAIDAVPVDENLFTGEDLDELEEELNTLDLEE

SEQ ID NO: 15903 - protein, 953 aa, Homo sapiens
MDVAESPERDPHSPEDEEQPQGLSDDDILRDSGSDQDLDGAGVRASDLEDEESAARGPSQEEEDNHSDEEDRASEPKSQDQDSEVNELSRGPTSSPCEEEGDEGEEDRTSDLRDEASSVTRELDEHELDYDEEVPEEPAPAVQEDEAEKAGAEDDEEKGEGTPREEGKAGVQSVGEKESLEAAKEKKKEDDDGEIDDGEIDDDDLEEGEVKDPSDRKVRPRPTCRFFMKGNCTWGMNCRFIHPGVNDKGNYSLITKADPFPPNGAPPLGPHPLMPANPWGGPVVDEILPPPPPEPPTESAWERGLRHAKEVLKKATIRKEQEPDFEEKRFTVTIGEDEREFDKENEVFRDWNSRIPRDVRDTVLEPYADPYYDYEIERFWRGGQYENFRVQYTETEPYHNYRERERERERENRQRERERERERDRERERRQRERERERERERDKERQRRKEEWERERAKRDEKDRQHRDRDREKEREKEKGKPKPRSPQPPSRQAEPPKKEAATTGPQVKRADEWKDPWRRSKSPKKKLGVSVSPSRARRRRKTSASSASASNSSRSSSRSSSYSGSGSSRSRSRSSSYSSYSSRSSRHSSFSGSRSRSRSFSSSPSPSPTPSPHRPSIRTKGEPAPPPGKAGEKSVKKPAPPPAPPQATKTTAPVPEPTKPGDPREARRKERPARTPPRRRTLSGSGSGSGSSYSGSSSRSRSLSVSSVSSVSSATSSSSSAHSVDSEDMYADLASPVSSASSRSPAPAQTRKEKGKSKKEDGVKEEKRKRDSSTQPPKSAKPPAGGKSSQQPSTPQQAPPGQPQQGTFVAHKEIKLTLLNKAADKGSRKRYEPSDKDRQSPPPAKRPNTSPDRGSRDRKSGGRLGSPKPERQRGQNSKAPAAPADRKRQLSPQSKSSSKVTSVPGKASDPGAASTKSGKASTLSRREELLKQLKAVEDAIARKRAKIPGKA

SEQ ID NO: 15904 - protein, 948 aa, Homo sapiens
MEEKEILRRQIRLLQGLIDDYKTLHGNAPAPGTPAASGWQPPTYHSGRAFSARYPRPSRRGYSSHHGPSWRKKYSLVNRPPGPSDPPADHAVRPLHGARGGQPPVPQQHVLERQVQLSQGQNVVIKVKPPSKSGSASASGAQRGSLEEFEETPWSDQRPREGEGEPPRGQLQPSRPTRARGTCSVEDPLLVCQKEPGKPRMVKSVGSVGDSPREPRRTVSESVIAVKASFPSSALPPRTGVALGRKLGSHSVASCAPQLLGDRRVDAGHTDQPVPSGSVGGPARPASGPRQAREASLVVTCRTNKFRKNNYKWVAASSKSPRVARRALSPRVAAENVCKASAGMANKVEKPQLIADPEPKPRKPATSSKPGSAPSKYKWKASSPSASSSSSFRWQSEASSKDHASQLSPVLSRSPSGDRPAVGHSGLKPLSGETPLSAYKVKSRTKIIRRRSSTSLPGDKKSGTSPAATAKSHLSLRRRQALRGKSSPVLKKTPNKGLVQVTTHRLCRLPPSRAHLPTKEASSLHAVRTAPTSKVIKTRYRIVKKTPASPLSAPPFPLSLPSWRARRLSLSRSLVLNRLRPVASGGGKAQPGSPWWRSKGYRCIGGVLYKVSANKLSKTSGQPSDAGSRPLLRTGRLDPAGSCSRSLASRAVQRSLAIIRQARQRREKRKEYCMYYNRFGRCNRGERCPYIHDPEKVAVCTRFVRGTCKKTDGTCPFSHHVSKEKMPVCSYFLKGICSNSNCPYSHVYVSRKAEVCSDFLKGYCPLGAKCKKKHTLLCPDFARRGACPRGAQCQLLHRTQKRHSRRAATSPAPGPSDATARSRVSASHGPRKPSASQRPTRQTPSSAALTAAAVAAPPHCPGGSASPSSSKASSSSSSSSSPPASLDHEAPSLQEAALAAACSNRLCKLPSFISLQSSPSPGAQPRVRAPRAPLTKDSGKPLHIKPRL

SEQ ID NO: 15905 - protein, 1303 aa, Homo sapiens
MEAAPGTPPPPPSESPPPPSPPPPSTPSPPPCSPDARPATPHLLHHRLPLPDDREDGELEEGELEDDGAEETQDTSGGPERSRKEKGEKHHSDSDEEKSHRRLKRKRKKEREKEKRRSKKRRKSKHKRHASSSDDFSDFSDDSDFSPSEKGHRKYREYSPPYAPSHQQYPPSHATPLPKKAYSKMDSKSYGMYEDYENEQYGEYEGDEEEDMGKEDYDDFTKELNQYRRAKEGSSRGRGSRGRGRGYRGRGSRGGSRGRGMGRGSRGRGRGSMGGDHPEDEEDFYEEEMDYGESEEPMGDDDYDEYSKELNQYRRSKDSRGRGLSRGRGRGSRGRGKGMGRGRGRGGSRGGMNKGGMNDDEDFYDEDMGDGGGGSYRSRDHDKPHQQSDKKGKVICKYFVEGRCTWGDHCNFSHDIELPKKRELCKFYITGFCARAENCPYMHGDFPCKLYHTTGNCINGDDCMFSHDPLTEETRELLDKMLADDAEAGAEDEKEVEELKKQGINPLPKPPPGVGLLPTPPRPPGPQAPTSPNGRPMQGGPPPPPPPPPPPPGPPQMPMPVHEPLSPQQLQQQDMYNKKIPSLFEIVVRPTGQLAEKLGVRFPGPGGPPGPMGPGPNMGPPGPMGGPMHPDMHPDMHPDMHPDMHADMHADMPMGPGMNPGPPMGPGGPPMMPYGPGDSPHSGMMPPIPPAQNFYENFYQQQEGMEMEPGLLGDAEDYGHYEELPGEPGEHLFPEHPLEPDSFSEGGPPGRPKPGAGVPDFLPSAQRALYLRIQQKQQEEEERARRLAESSKQDRENEEGDTGNWYSSDEDEGGSSVTSILKTLRQQTSSRPPASVGELSSSGLGDPRLQKGHPTGSRLADPRLSRDPRLTRHVEASGGSGPGDSGPSDPRLARALPTSKPEGSLHSSPVGPSSSKGSGPPPTEEEEGERALREKAVNIPLDPLPGHPLRDPRSQLQQFSHIKKDVTLSKPSFARTVLWNPEDLIPLPIPKQDAVPPVPAALQSMPTLDPRLHRAATAGPPNARQRPGASTDSSTQGANLPDFELLSRILKTVNATGSSAAPGSSDKPSDPRVRKAPTDPRLQKPTDSTASSRAAKPGPAEAPSPTASPSGDASPPATAPYDPRVLAAGGLGQGGGGGQSSVLSGISLYDPRTPNAGGKATEPAADTGAQPKGAEGNGKSSASKAKEPPFVRKSALEQPETGKAGADGGTPTDRYNSYNRPRPKAAAAPAATTATPPPEGAPPQPGVHNLPVPTLFGTVKQTPKTGSGSPFAGNSPAREGEQDAASLKDVFKGFDPTASPFCQ

SEQ ID NO: 15906 - protein, 1189 aa, Homo sapiens
MTDSEHAGHDREDGELEDGEIDDAGFEEIQEKEAKENEKQKSEKAYRKSRKKHKKEREKKKSKRRKREKHKHNSPSSDDSSDYSLDSDVEHTESSHKKRTGFYRDYDIPFTQRGHISGSYITSKKGQHNKKFKSKEYDEYSTYSDDNFGNYSDDNFGNYGQETEEDFANQLKQYRQAKETSNIALGSSFSKESGKKQRMKGVQQGIEQRVKSFNVGRGRGLPKKIKRKERGGRTNKGPNVFSVSDDFQEYNKPGKKWKVMTQEFINQHTVEHKGKQICKYFLEGRCIKGDQCKFDHDAELEKRKEICKFYLQGYCTKGENCIYMHNEFPCKFYHSGAKCYQGDNCKFSHDDLTKETKKLLDKVLNTDEELINEDERELEELRKRGITPLPKPPPGVGLLPTPPEHFPFSDPEDDFQTDFSDDFRKIPSLFEIVVKPTVDLAHKIGRKPPAFYTSASPPGPQFQGSSPHPQHIYSSGSSPGPGPNMSQGHSSPVMHPGSPGHHPCAGPPGLPVPQSPPLPPGPPEIVGPQNQAGVLVQPDTSLTPPSMGGAYHSPGFPGHVMKVPRENHCSPGSSYQQSPGEMQLNTNYESLQNPAEFYDNYYAQHSIHNFQPPNNSGDGMWHGEFAQQQPPVVQDSPNHGSGSDGSSTRTGHGPLPVPGLLPAVQRALFVRLTQRYQEDEEQTSTQPHRAPSKEEDDTVNWYSSSEEEEGSSVKSILKTLQKQTETLRNQQQPSTELSTPTDPRLAKEKSKGNQVVDPRLRTIPRQDIRKPSESAPLDLRLAWDPRKLRGNGSGHIGSSVGGAKFDLHHANAGTNVKHKRGDDDDEDTERELREKAFLIPLDASPGIMLQDPRSQLRQFSHIKMDITLTKPNFAKHIVWAPEDLLPVPLPKPDPVSSINLPLPPLIADQRLNRLWNTKSDLHQNTVSIDPKLAAKAKINTTNREGYLEQFGDSHGSGAKLGDPRLQKNFDPRLHRLPNTESHQVVMKDSHASKGAPHLPRSNPGSSQPSGAGTSNSGSGALPPYAPKLSSSAGLPLGTSTSVLSGISLYDPRDHGSSSTSELATASSGENSKNQKKSGGLKSSDKTEPSPGEAILPQKPSPNVGVTLEGPADPQADVPRSSGKVQVPAVHSLPVQALTGLIRPQYSDPRQARQPGQGSPTPDNDPGRETDDKSLKEVFKTFDPTASPFC

SEQ ID NO: 15907 - protein, 971 aa, Homo sapiens
MSNVSEERRKRQQNIKEGLQFIQSPLSYPGTQEQYAVYLRALVRNLFNEGNDVYREHDWNNSISQYTEALNIADYAKSEEILIPKEIIEKLYINRIACYSNMGFHDKVLEDCNIVLSLNASNCKALYRKSKALSDLGRYKKAYDAVAKCSLAVPQDEHVIKLTQELAQKLGFKIRKAYVRAELSLKSVPGDGATKALNHSVEDIEPDLLTPRQEAVPVVSLPAPSFSHEVGSELASVPVMPLTSILPLQVEESALPSAVLANGGKMPFTMPEAFLDDGDMVLGDELDDLLDSAPETNETVMPSALVRGPLQTASVSPSMPFSASLLGTLPIGARYAPPPSFSEFYPPLTSSLEDFCSSLNSFSMSESKRDLSTSTSREGTPLNNSNSSLLLMNGPGSLFASENFLGISSQPRNDFGNFFGSAVTKPSSSVTPRHPLEGTHELRQACQICFVKSGPKLMDFTYHANIDHKCKKDILIGRIKNVEDKSWKKIRPRPTKTNYEGPYYICKDVAAEEECRYSGHCTFAYCQEEIDVWTLERKGAFSREAFFGGNGKINLTVFKLLQEHLGEFIFLCEKCFDHKPRMISKRNKDNSTACSHPVTKHEFEDNKCLVHILRETTVKYSKIRSFHGQCQLDLCRHEVRYGCLREDECFYAHSLVELKVWIMQNETGISHDAIAQESKRYWQNLEANVPGAQVLGNQIMPGFLNMKIKFVCAQCLRNGQVIEPDKNRKYCSAKARHSWTKDRRAMRVMSIERKKWMNIRPLPTKKQMPLQFDLCNHIASGKKCQYVGNCSFAHSPEEREVWTYMKENGIQDMEQFYELWLKSQKNEKSEDIASQSNKENGKQIHMPTDYAEVTVDFHCWMCGKNCNSEKQWQGHISSEKHKEKVFHTEDDQYCWQHRFPTGYFSICDRYMNGTCPEGNSCKFAHGNAELHEWEERRDALKMKLNKARKDHLIGPNDNDFGKYSFLFKDLN

SEQ ID NO: 15908 - protein, 993 aa, Homo sapiens
MERQKRKADIEKGLQFIQSTLPLKQEEYEAFLLKLVQNLFAEGNDLFREKDYKQALVQYMEGLNVADYAASDQVALPRELLCKLHVNRAACYFTMGLYEKALEDSEKALGLDSESIRALFRKARALNELGRHKEAYECSSRCSLALPHDESVTQLGQELAQKLGLRVRKAYKRPQELETFSLLSNGTAAGVADQGTSNGLGSIDDIETGNVPDTREQVEIGAPRDCYVDPRGSPALLPSTPTMPLFPHVLDLLAPLDSSRTLPSTDSLDDFSDGDVFGPELDTLLDSLSLVQGGLSGSGVPSELPQLIPVFPGGTPLLPPVVGGSIPVSSPLPPASFGLVMDPSKKLAASVLDALDPPGPTLDPLDLLPYSETRLDALDSFGSTRGSLDKPDSFMEETNSQDHRPPSGAQKPAPSPEPCMPNTALLIKNPLAATHEFKQACQLCYPKTGPRAGDYTYREGLEHKCKRDILLGRLRSSEDQTWKRIRPRPTKTSFVGSYYLCKDMINKQDCKYGDNCTFAYHQEEIDVWTEERKGTLNRDLLFDPLGGVKRGSLTIAKLLKEHQGIFTFLCEICFDSKPRIISKGTKDSPSVCSNLAAKHSFYNNKCLVHIVRSTSLKYSKIRQFQEHFQFDVCRHEVRYGCLREDSCHFAHSFIELKVWLLQQYSGMTHEDIVQESKKYWQQMEAHAGKASSSMGAPRTHGPSTFDLQMKFVCGQCWRNGQVVEPDKDLKYCSAKARHCWTKERRVLLVMSKAKRKWVSVRPLPSIRNFPQQYDLCIHAQNGRKCQYVGNCSFAHSPEERDMWTFMKENKILDMQQTYDMWLKKHNPGKPGEGTPISSREGEKQIQMPTDYADIMMGYHCWLCGKNSNSKKQWQQHIQSEKHKEKVFTSDSDASGWAFRFPMGEFRLCDRLQKGKACPDGDKCRCAHGQEELNEWLDRREVLKQKLAKARKDMLLCPRDDDFGKYNFLLQEDGDLAGATPEAPAAAATATTGE

SEQ ID NO: 15909 - protein, 291 aa, Homo sapiens [sequence omitted]

SEQ ID NO: 15910 - protein, 1644 aa, Homo sapiens
MEESKTLKSENHEPKKNVICEESKAVQVIGNQTLKARNDKSVKEIENSSPNRNSSKKNKQNDICIEKTEVKSCKVNAANLPGPKDLGLVLRDQSHCKAKKFPNSPVKAEKATISQAKSEKATSLQAKAEKSPKSPNSVKAEKASSYQMKSEKVPSSPAEAEKGPSLLLKDMRQKTELQQIGKKIPSSFTSVDKVNIEAVGGEKCALQNSPRSQKQQTCTDNTGDSDDSASGIEDVSDDLSKMKNDESNKENSSEMDYLENATVIDESALTPEQRLGLKQAEERLERDHIFRLEKRSPEYTNCRYLCKLCLIHIENIQGAHKHIKEKRHKKNILEKQEESELRSLPPPSPAHLAALSVAVIELAKEHGITDDDLRVRQEIVEEMSKVITTFLPECSLRLYGSSLTRFALKSSDVNIDIKFPPKMNHPDLLIKVLGILKKNVLYVDVESDFHAKVPVVVCRDRKSGLLCRVSAGNDMACLTTDLLTALGKIEPVFIPLVLAFRYWAKLCYIDSQTDGGIPSYCFALMVMFFLQQRKPPLLPCLLGSWIEGFDPKRMDDFQLKGIVEEKFVKWECNSSSATEKNSIAEENKAKADQPKDDTKKTETDNQSNAMKEKHGKSPLALETPNRVSLGQLWLELLKFYTLDFALEEYVICVRIQDILTRENKNWPKRRIAIEDPFSVKRNVARSLNSQLVYEYVVERFRAAYRYFACPQTKGGNKSTVDFKKREKGKISNKKPVKSNNMATNGCILLGETTEKINAEREQPVQCDEMDCTSQRCIIDNNNLLVNELDFADHGQDSSSLSTSKSSEIEPKLDKKQDDLAPSETCLKKELSQCNCIDLSKSPDPDKSTGTDCRSNLETESSHQSVCTDTSATSCNCKATEDASDLNDDDNLPTQELYYVFDKFILTSGKPPTIVCSICKKDGHSKNDCPEDFRKIDLKPLPPMTNRFREILDLVCKRCFDELSPPCSEQHNREQILIGLEKFIQKEYDEKARLCLFGSSKNGFGFRDSDLDICMTLEGHENAEKLNCKEIIENLAKILKRHPGLRNILPITTAKVPIVKFEHRRSGLEGDISLYNTLAQHNTRMLATYAAIDPRVQYLGYTMKVFAKRCDIGDASRGSLSSYAYILMVLYFLQQRKPPVIPVLQEIFDGKQIPQRMVDGWNAFFFDKTEELKKRLPSLGKNTESLGELWLGLLRFYTEEFDFKEYVISIRQKKLLTTFEKQWTSKCIAIEDPFDLNHNLGAGVSRKMTNFIMKAFINGRKLFGTPFYPLIGREAEYFFDSRVLTDGELAPNDRCCRVCGKIGHYMKDCPKRKSLLFRLKKKDSEEEKEGNEEEKDSRDVLDPRDLHDTRDFRDPRDLRCFICGDAGHVRRECPEVKLARQRNSSVAAAQLVRNLVNAQQVAGSAQQQGDQSIRTRQSSECSESPSYSPQPQPFPQNSSQSAAITQPSSQPGSQPKLGPPQQGAQPPHQVQMPLYNFPQSPPAQYSPMHNMGLLPMHPLQIPAPSWPIHGPVIHSAPGSAPSNIGLNDPSIIFAQPAARPVAIPNTSHDGHWPRTVAPNSLVNSGAVGNSEPGFRGLTPPIPWEHAPRPHFPLVPASWPYGLHQNFMHQGNARFQPNKPFYTQDRCATRRCRERCPHPPRGNVSE

SEQ ID NO: 15911 - protein, 1495 aa, Homo sapiens
MGDTAKPYFVKRTKDRGTMDDDDFRRGHPQQDYLIIDDHAKGHGSKMEKGLQKKKITPGNYGNTPRKGPCAVSSNPYAFKNPIYSQPAWMNDSHKDQSKRWLSDEHTGNSDNWREFKPGPRIPVINRQRKDSFQENEDGYRWQDTRGCRTVRRLFHKDLTSLETTSEMEAGSPENKKQRSRPRKPRKTRNEENEQDGDLEGPVIDESVLSTKELLGLQQAEERLKRDCIDRLKRRPRNYPTAKYTCRLCDVLIESIAFAHKHIKEKRHKKNIKEKQEEELLTTLPPPTPSQINAVGIAIDKVVQEFGLHNENLEQRLEIKRIMENVFQHKLPDCSLRLYGSSCSRLGFKNSDVNIDIQFPAIMSQPDVLLLVQECLKNSDSFIDVDADFHARVPVVVCREKQSGLLCKVSAGNENACLTTKHLTALGKLEPKLVPLVIAFRYWAKLCSIDRPEEGGLPPYVFALMAIFFLQQRKEPLLPVYLGSWIEGFSLSKLGNFNLQDIEKDVVIWEHTDSAAGDTGITKEEAPRETPIKRGQVSLILDVKHQPSVPVGQLWVELLRFYALEFNLADLVISIRVKELVSRELKDWPKKRIAIEDPYSVKRNVARTLNSQPVFEYILHCLRTTYKYFALPHKITKSSLLKPLNAITCISEHSKEVINHHPDVQTKDDKLKNSVLAQGPGATSSAANTCKVQPLTLKETAESFGSPPKEEMGNEHISVHPENSDCIQADVNSDDYKGDKVYHPETGRKNEKEKVGRKGKHLLTVDQKRGEHVVCGSTRNNESESTLDLEGFQNPTAKECEGLATLDNKADLDGESTEGTEELEDSLNHFTHSVQGQTSEMIPSDEEEEDDEEEEEEEEPRLTINQREDEDGMANEDELDNTYTGSGDEDALSEEDDELGEAAKYEDVKECGKHVERALLVELNKISLKEENVCEEKNSPVDQSDFFYEFSKLIFTKGKSPTVVCSLCKREGHLKKDCPEDFKRIQLEPLPPLTPKFLNILDQVCIQCYKDFSPTIIEDQAREHIRQNLESFIRQDFPGTKLSLFGSSKNGFGFKQSDLDVCMTINGLETAEGLDCVRTIEELARVLRKHSGLRNILPITTAKVPIVKFFHLRSGLEVDISLYNTLALHNTRLLSAYSAIDPRVKYLCYTMKVFTKMCDIGDASRGSLSSYAYTLMVLYFLQQRNPPVIPVLQEIYKGEKKPEIFVDGWNIYFFDQIDELPTYWSECGKNTESVGQLWLGLLRFYTEEFDFKEHVISIRRKSLLTTFKKQWTSKYIVIEDPFDLNHNLGAGLSRKMTNFIMKAFINGRRVFGIPVKGFPKDYPSKMEYFFDPDVLTEGELAPNDRCCRICGKIGHFMKDCPMRRKVRRRRDQEDALNQRYPENKEKRSKEDKEIHNKYTEREVSTKEDKPIQCTPQKAKPMRAAADLGREKILRPPVEKWKRQDDKDLREKRCFICGREGHIKKECPQFKGSSGSLSSKYMTQGKASAKRTQQES

SEQ ID NO: 15912 - protein, 1124 aa, Homo sapiens
MADGPRCKRRKQANPRRNNVTNYNTVVETNSDSDDEDKLHIVEEESVTDAADCEGVPEDDLPTDQTVLPGRSSEREGNAKNCWEDDRKEGQEILGPEAQADEAGCTVKDDECESDAENEQNHDPNVEEFLQQQDTAVIFPEAPEEDQRQGTPEASGHDENGTPDAFSQLLTCPYCDRGYKRFTSLKEHIKYRHEKNEDNFSCSLCSYTFAYRTQLERHMTSHKSGRDQRHVTQSGCNRKFKCTECGKAFKYKHHLKEHLRIHSGEKPYECPNCKKRFSHSGSYSSHISSKKCISLIPVNGRPRTGLKTSQCSSPSLSASPGSPTRPQIRQKIENKPLQEQLSVNQIKTEPVDYEFKPIVVASGINCSTPLQNGVFTGGGPLQATSSPQGMVQAVVLPTVGLVSPISINLSDIQNVLKVAVDGNVIRQVLENNQANLASKEQETINASPIQQGGHSVISAISLPLVDQDGTTKIIINYSLEQPSQLQVVPQNLKKENPVATNSCKSEKLPEDLTVKSEKDKSFEGGVNDSTCLLCDDCPGDINALPELKHYDLKQPTQPPPLPAAEAEKPESSVSSATGDGNLSPSQPPLKNLLSLLKAYYALNAQPSAEELSKIADSVNLPLDVVKKWFEKMQAGQISVQSSEPSSPEPGKVNIPAKNNDQPQSANANEPQDSTVNLQSPLKMTNSPVLPVGSTTNGSRSSTPSPSPLNLSSSRNTQGYLYTAEGAQEEPQVEPLDLSLPKQQGELLERSTITSVYQNSVYSVQEEPLNLSCAKKEPQKDSCVTDSEPVVNVIPPSANPINIAIPTVTAQLPTIVAIADQNSVPCLRALAANKQTILIPQVAYTYSTTVSPAVQEPPLKVIQPNGNQDERQDTSSEGVSNVEDQNDSDSTPPKKKMRKTENGMYACDLCDKIFQKSSSLLRHKYEHTGKRPHECGICKKAFKHKHHLIEHMRLHSGEKPYQCDKCGKRFSHSGSYSQHMNHRYSYCKREAEERDSTEQEEAGPEILSNEHVGARASPSQGDSDERESLTREEDEDSEKEEEEEDKEMEELQEEKECEKPQGDEEEEEEEEEVEEEEVEEAENEGEEAKTEGLMKDDRAESQASSLGQKVGESSEQVSEEKTNEA

SEQ ID NO: 15913 - protein, 1214 aa, Homo sapiens
MKQPIMADGPRCKRRKQANPRRKNVVNYDNVVDTGSETDEEDKLHIAEDDGIANPLDQETSPASVPNHESSPHVSQALLPREEEEDEIREGGVEHPWHNNEILQASVDGPEEMKEDYDTMGPEATIQTAINNGTVKNANCTSDFEEYFAKRKLEERDGHAVSIEEYLQRSDTAIIYPEAPEELSRLGTPEANGQEENDLPPGTPDAFAQLLTCPYCDRGYKRLTSLKEHIKYRHEKNEENFSCPLCSYTFAYRTQLERHMVTHKPGTDQHQMLTQGAGNRKFKCTECGKAFKYKHHLKEHLRIHSGEKPYECPNCKKRFSHSGSYSSHISSKKCIGLISVNGRMRNNIKTGSSPNSVSSSPTNSAITQLRNKLENGKPLSMSEQTGLLKIKTEPLDFNDYKVLMATHGFSGTSPFMNGGLGATSPLGVHPSAQSPMQHLGVGMEAPLLGFPTMNSNLSEVQKVLQIVDNTVSRQKMDCKAEEISKLKGYHMKDPCSQPEEQGVTSPNIPPVGLPVVSHNGATKSIIDYTLEKVNEAKACLQSLTTDSRRQISNIKKEKLRTLIDLVTDDKMIENHNISTPFSCQFCKESFPGPIPLHQHERYLCKMNEEIKAVLQPHENIVPNKAGVFVDNKALLLSSVLSEKGMTSPINPYKDHMSVLKAYYAMNMEPNSDELLKISIAVGLPQEFVKEWFEQRKVYQYSNSRSPSLERSSKPLAPNSNPPTKDSLLPRSPVKPMDSITSPSIAELHNSVTNCDPPLRLTKPSHFTNIKPVEKLDHSRSNTPSPLNLSSTSSKNSHSSSYTPNSFSSEELQAEPLDLSLPKQMKEPKSIIATKNKTKASSISLDHNSVSSSSENSDEPLNLTFIKKEFSNSNNLDNKSTNPVFSMNPFSAKPLYTALPPQSAFPPATFMPPVQTSIPGLRPYPGLDQMSFLPHMAYTYPTGAATFADMQQRRKYQRKQGFQGELLDGAQDYMSGLDDMTDSDSCLSRKKIKKTESGMYACDLCDKTFQKSSSLLRHKYEHTGKRPHQCQICKKAFKHKHHLIEHSRLHSGEKPYQCDKCGKRFSHSGSYSQHMNHRYSYCKREAEEREAAEREAREKGHLEPTELLMNRAYLQSITPQGYSDSEERESMPRDGESEKEHEKEGEDGYGKLGRQDGDEEFEEEEEESENKSMDTDPETIRDEEETGDHSMDDSSEDGKMETKSDHEEDNMEDGM

SEQ ID NO: 15914 - protein, 1243 aa, Homo sapiens
METRAAENTAIFMCKCCNLFSPNQSELLSHVSEKHMEEGVNVDEIIIPLRPLSTPEPPNSSKTGDEFLVMKRKRGRPKGSTKKSSTEEELAENIVSPTEDSPLAPEEGNSLPPSSLECSKCCRKFSNTRQLRKHICIIVLNLGEEEGEAGNESDLELEKKCKEDDREKASKRPRSQKTEKVQKISGKEARQLSGAKKPIISVVLTAHEAIPGATKIVPVEAGPPETGATNSETTSADLVPRRGYQEYAIQQTPYEQPMKSSRLGPTQLKIFTCEYCNKVFKFKHSLQAHLRIHTNEKPYKCPQCSYASAIKANLNVHLRKHTGEKFACDYCSFTCLSKGHLKVHIERVHKKIKQHCRFCKKKYSDVKNLIKHIRDAHDPQDKKVKEALDELCLMTREGKRQLLYDCHICERKFKNELDRDRHMLVHGDKWPFACELCGHGATKYQALELHVRKHPFVYVCAVCRKKFVSSIRLRTHIKEVHGAAQEALVFTSSINQSFCLLEPGGDIQQEALGDQLQLVEEEFALQGVNALKEEACPGDTQLEEGRKEPEAPGEMPAPAVHLASPQAESTALPPCELETTVVSSSDLHSQEVVSDDFLLKNDTSSAEAHAAPEKPPDMQHRSSVQTQGEVITLLLSKAQSAGSDQESHGAQSPLGEGQNMAVLSAGDPDPSRCLRSNPAEASDLLPPVAGGGDTITHQPDSCKAAPEHRSGITAFMKVLNSLQKKQMNTSLCERIRKVYGDLECEYCGKLFWYQVHFDMHVRTHTREHLYYCSQCHYSSITKNCLKRHVIQKHSNILLKCPTDGCDYSTPDKYKLQAHLKVHTALDKRSYSCPVCEKSFSEDRLIKSHIKTNHPEVSMSTISEVLGRRVQLKGLIGKRAMKCPYCDFYFMKNGSDLQRHIWAHEGVKPFKCSLCEYATRSKSNLKAHMNRHSTEKTHLCDMCGKKFKSKGTLKSHKLLHTADGKQFKCTVCDYTAAQKPQLLRHMEQHVSFKPFRCAHCHYSCNISGSLKRHYNRKHPNEEYANVGTGELAAEVLIQQGGLKCPVCSFVYGTKWEFNRHLKNKHGLKVVEIDGDPKWETATEAPEEPSTQYLHITEAEEDVQGTQAAVAALQDLRYTSESGDRLDPTAVNILQQIIELGAETHDATALASVVAMAPGTVTVVKQVTEEEPSSNHTVMIQETVQQASVELAEQHHLVVSSDDVEGIETVTVYTQGGEASEFIVYVQEAMQPVEEQAVEQPAQEL

SEQ ID NO: 15915 - protein, 2572 aa, Homo sapiens
MATLNSASTTGTTPSPGHNAPSLPSDTFSSSTPSDPVTKDPPAASSTSENMRSSEPGGQLLESGCGLVPPKEIGEPQEGPDCGHFPPNDPGVEKDKEQEEEEEGLPPMDLSNHLFFTAGGEAYLVAKLSLPGGSELLLPKGFPWGEAGIKEEPSLPFLAYPPPSHLTALHIQHGFDPIQGFSSSDQILSHDTSAPSPAACEERHGAFWSYQLAPNPPGDPKDGPMGNSGGNHVAVFWLCLLCRLGFSKPQAFMDHTQSHGVKLTPAQYQGLSGSPAVLQEGDEGCKALISFLEPKLPARPSSDIPLDNSSTVNMEANVAQTEDGPPEAEVQALILLDEEVMALSPPSPPTATWDPSPTQAKESPVAAGEAGPDWFPEGQEEDGGLCPPLNQSSPTSKEGGTLPAPVGSPEDPSDPPQPYRLADDYTPAPAAFQGLSLSSHMSLLHSRNSCKTLKCPKCNWHYKYQQTLDVHMREKHPESNSHCSYCSAGGAHPRLARGESYNCGYKPYRCDVCNYSTTTKGNLSIHMQSDKHLANLQGFQAGPGGQGSPPEASLPPSAGDKEPKTKSSWQCKVCSYETNISRNLRIHMTSEKHMQNVLMLHQGLPLGLPPGLMGPGPPPPPGATPTSPPELFQYFGPQALGQPQTPLAGPGLRPDKPLEAQLLLNGFHHVGAPARKFPTSAPGSLSPDAHLPPSQLLGSSSDSLPTSPPPDDSLSLKVFRCLVCQAFSTDSLELLLYHCSIGRSLPEAEWKEVAGDTHRCKLCCYGTQLKANFQLHLKTDKHAQKYQLAAHLREGGGAMGTPSPASLGDGAPYGSVSPLHLRCNICDFESNSKEKMQLHARGAAHEENSQIYKFLLDMEGAEAGAELGLYHCLLCAWETPSRLAVLQHLRTPAHRDAQAQRRLQLLQNGPTTEEGLAALQSILSFSHGQLRTPGKAPVTPLAEPPTPEKDAQNKTEQLASEETENKTGPSRDSANQTTVYCCPYCSFLSPESSQVRAHTLSQHAVQPKYRCPLCQEQLVGRPALHFHLSHLHNVVPECVEKLLLVATTVEMTFTTKVLSAPTLSPLDNGQEPPTHGPEPTPSRDQAAEGPNLTPEASPDPLPEPPLASVEVPDKPSGSPGQPPSPAPSPVPEPDAQAEDVAPPPTMAEEEEGTTGELRSAEPAPADSRHPLTYRKTTNFALDKFLDPARPYKCTVCKESFTQKNILLVHYNSVSHLHKMKKAAIDPSAPARGEAGAPPTTTAATDKPFKCTVCRVSYNQSSTLEIHMRSVLHQTRSRGTKTDSKIEGPERSQEEPKEGETEGEVGTEKKGPDTSGFISGLPFLSPPPPPLDLHRFPAPLFTPPVLPPFPLVPESLLKLQQQQLLLPFYLHDLKVGPKLTLAGPAPVLSLPAATPPPPPQPPKAELAEREWERPPMAKEGNEAGPSSPPDPLPNEAARTAAKALLENFGFELVIQYNEGKQAVPPPPTPPPPEALGGGDKLACGACGKLFSNMLILKTHEEHVHRRFLPFEALSRYAAQFRKSYDSLYPPLAEPPKPPDGSLDSPVPHLGPPFLVPEPEAGGTRAPEERSRAGGHWPIEEEESSRGNLPPLVPAGRRFSRTKFTEFQTQALQSFFETSAYPKDGEVERLASLLGLASRVVVVWFQNARQKARKNACEGGSMPTGGGTGGASGCRRCHATFSCVFELVRHLKKCYDDQTLEEEEEEAERGEEEEEVEEEEVEEEQGLEPPAGPEGPLPEPPDGEELSQAEATKAGGKEPEEKATPSPSPAHTCDQCAISFSSQDLLTSHRRLHFLPSLQPSAPPQLLDLPLLVFGERNPLVAATSPMPGPPLKRKHEDGSLSPTGSEAGGGGEGEPPRDKRLRTTILPEQLEILYRWYMQDSNPTRKMLDCISEEVGLKKRVVQVWFQNTRARERKGQFRSTPGGVPSPAVKPPATATPASLPKFNLLLGKVDDGTGREAPKREAPAFPYPTATLASGPQPFLPPGKEATTPTPEPPLPLLPPPPPSEEEGPEEPPKASPESEACSLSAGDLSDSSASSLAEPESPGAGGTSGGPGGGTGVPDGMGQRRYRTQMSSLQLKIMKACYEAYRTPTMQECEVLGEEIGLPKRVIQVWFQNARAKEKKAKLQGTAAGSTGGSSEGLLAAQRTDCPYCDVKYDFYVSCRGHLFSRQHLAKLKEAVRAQLKSESKCYDLAPAPEAPPALKAPPATTPASMPLGAAPTLPRLAPVLLSGPALAQPPLGNLAPFNSGPAASSGLLGLATSVLPTTTVVQTAGPGRPLPQRPMPDQTNTSTAGTTDPVPGPPTEPLGDKVSSERKPVAGPTSSSNDALKNLKALKTTVPALLGGQFLPFPLPPAGGTAPPAVFGPQLQGAYFQQLYGMKKGLFPMNPMIPQTLIGLLPNALLQPPPQPPEPTATAPPKPPELPAPGEGEAGEVDELLTGSTGISTVDVTHRYLCRQCKMAFDGEAPATAHQRSFCFFGRGSGGSMPPPLRVPICTYHCLACEVLLSGREALASHLRSSAHRRKAAPPQGGPPISITNAATAASAAVAFAKEEARLPHTDSNPKTTTTSTLLAL

SEQ ID NO: 15916 - protein, 3703 aa, Homo sapiens
MEGCDSPVVSGKDNGCGIPQHQQWTELNSTHLPDKPSSMEQSTGESHGPLDSLRAPFNERLAESTASAGPPSEPASKEVTCNECSASFASLQTYMEHHCPSARPPPPLREESASDTGEEGDEESDVENLAGEIVYQPDGSAYIVESLSQLTQGGGACGSGSGSGPLPSLFLNSLPGAGGKQGDPSCAAPVYPQIINTFHIASSFGKWFEGPDQAFPNTSALAGLSPVLHSFRVFDVRHKSNKDYLNSDGSAKSSCVSKDVPNNVDLSKFDGFVLYGKRKPILMCFLCKLSFGYVRSFVTHAVHDHRMTLSEDERKILSNKNISAIIQGIGKDKEPLVSFLEPKNKNFQHPLVSTANLIGPGHSFYGKFSGIRMEGEEALPAGSAAGPEQPQAGLLTPSTLLNLGGLTSSVLKTPITSVPLGPLASSPTKSSEGKDSGAAEGEKQEVGDGDCFSEKVEPAEEEAEEEEEEEEAEEEEEEEEEEEEEEEDEGCKGLFPSELDEELEDRPHEEPGAAAGSSSKKDLALSNQSISNSPLMPNVLQTLSRGTASTSSNSASSFVVFDGANRRNRLSFNSEGVRANVAEGGRRLDFADESANKDNATAPEPNESTEGDDGGFVPHHQHAGSLCELGVGECPSGSGVECPKCDTVLGSSRSLGGHMTMMHSRNSCKTLKCPKCNWHYKYQQTLEAHMKEKHPEPGGSCVYCKSGQPHPRLARGESYTCGYKPFRCEVCNYSTTTKGNLSIHMQSDKHLNNMQNLQNGGGEQVFSHTAGAAAAAVAAAAAAANISSSCGAPSPTKPKTKPTWRCEVCDYETNVARNLRIHMTSEKHMHNMMLLQQNMTQIQHNRHLGLGSLPSPAEAELYQYYLAQNMNLPNLKMDSAASDAQFMMSGFQLDPAGPMAAMTPALVGGEIPLDMRLGGGQLVSEELMNLGESFIQTNDPSLKLFQCAVCNKFTTDNLDMLGLHMNVERSLSEDEWKAVMGDSYQCKLCRYNTQLKANFQLHCKTDKHVQKYQLVAHIKEGGKANEWRLKCVAIGNPVHLKCNACDYYTNSLEKLRLHTVNSRHEASLKLYKHLQQHESGVEGESCYYHCVLCNYSTKAKLNLIQHVRSMKHQRSESLRKLQRLQKGLPEEDEDLGQIFTIRRCPSTDPEEAIEDVEGPSETAADPEELAKDQEGGASSSQAEKELTDSPATSKRISFPGSSESPLSSKRPKTAEEIKPEQMYQCPYCKYSNADVNRLRVHAMTQHSVQPMLRCPLCQDMLNNKIHLQLHLTHLHSVAPDCVEKLIMTVTTPEMVMPSSMFLPAAVPDRDGNSNLEEAGKQPETSEDLGKNILPSASTEQSGDLKPSPADPGSVREDSGFICWKKGCNQVFKTSAALQTHFNEVHAKRPQLPVSDRHVYKYRCNQCSLAFKTIEKLQLHSQYHVIRAATMCCLCQRSFRTFQALKKHLETSHLELSEADIQQLYGGLLANGDLLAMGDPTLAEDHTIIVEEDKEEESDLEDKQSPTGSDSGSVQEDSGSEPKRALPFRKGPNFTMEKFLDPSRPYKCTVCKESFTQKNILLVHYNSVSHLHKLKRALQESATGQPEPTSSPDNKPFKCNTCNVAYSQSSTLEIHMRSVLHQTKARAAKLEAASGSSNGTGNSSSISLSSSTPSPVSTSGSNTFTTSNPSSAGIAPSSNLLSQVPTESVGMPPLGNPIGANIASPSEPKEANRKKLADMIASRQQQQQQQQQQQQQQQQQQQAQTLAQAQAQVQAHLQQELQQQAALIQSQLFNPTLLPHFPMTTETLLQLQQQQHLLFPFYIPSAEFQLNPEVSLPVTSGALTLTGTGPGLLEDLKAQVQVPQQSHQQILPQQQQNQLSIAQSHSALLQPSQHPEKKNKLVIKEKEKESQRERDSAEGGEGNTGPKETLPDALKAKEKKELAPGGGSEPSMLPPRIASDARGNATKALLENFGFELVIQYNENKQKVQKKNGKTDQGENLEKLECDSCGKLFSNILILKSHQEHVHQNYFPFKQLERFAKQYRDHYDKLYPLRPQTPEPPPPPPPPPPPPLPAAPPQPASTPAIPASAPPITSPTIAPAQPSVPLTQLSMPMELPIFSPLMMQTMPLQTLPAQLPPQLGPVEPLPADLAQLYQHQLNPTLLQQQNKRPRTRITDDQLRVLRQYFDINNSPSEEQIKEMADKSGLPQKVIKHWFRNTLFKERQRNKDSPYNFSNPPITSLEELKIDSRPPSPEPPKQEYWGSKRSSRTRFTDYQLRVLQDFFDANAYPKDDEFEQLSNLLNLPTRVIVVWFQNARQKARKNYENQGEGKDGERRELTNDRYIRTSNLNYQCKKCSLVFQRIFDLIKHQKKLCYKDEDEEGQDDSQNEDSMDAMEILTPTSSSCSTPMPSQAYSAPAPSANNTASSAFLQLTAEAEELATFNSKTEAGDEKPKLAEAPSAQPNQTQEKQGQPKPELQQQEQPEQKTNTPQQKLPQLVSLPSLPQPPPQAPPPQCPLPQSSPSPSQLSHLPLKPLHTSTPQQLANLPPQLIPYQCDQCKLAFPSFEHWQEHQQLHFLSAQNQFIHPQFLDRSLDMPFMLFDPSNPLLASQLLSGAIPQIPASSATSPSTPTSTMNTLKRKLEEKASASPGENDSGTGGEEPQRDKRLRTTITPEQLEILYQKYLLDSNPTRKMLDHIAHEVGLKKRVVQVWFQNTRARERKGQFRAVGPAQAHRRCPFCRALFKAKTALEAHIRSRHWHEAKRAGYNLTLSAMLLDCDGGLQMKGDIFDGTSFSHLPPSSSDGQGVPLSPVSKTMELSPRTLLSPSSIKVEGIEDFESPSMSSVNLNFDQTKLDNDDCSSVNTAITDTTTGDEGNADNDSATGIATETKSSSAPNEGLTKAAMMAMSEYEDRLSSGLVSPAPSFYSKEYDNEGTVDYSETSSLADPCSPSPGASGSAGKSGDSGDRPGQKRFRTQMTNLQLKVLKSCFNDYRTPTMLECEVLGNDIGLPKRVVQVWFQNARAKEKKSKLSMAKHFGINQTSYEGPKTECTLCGIKYSARLSVRDHIFSQQHISKVKDTIGSQLDKEKEYFDPATVRQLMAQQELDRIKKANEVLGLAAQQQGMFDNTPLQALNLPTAYPALQGIPPVLLPGLNSPSLPGFTPSNTALTSPKPNLMGLPSTTVPSPGLPTSGLPNKPSSASLSSPTPAQATMAMGPQQPPQQQQQQQQPQVQQPPPPPAAQPPPTPQLPLQQQQQRKDKDSEKVKEKEKAHKGKGEPLPVPKKEKGEAPTATAATISAPLPTMEYAVDPAQLQALQAALTSDPTALLTSQFLPYFVPGFSPYYAPQIPGALQSGYLQPMYGMEGLFPYSPALSQALMGLSPGSLLQQYQQYQQSLQEAIQQQQQRQLQQQQQQKVQQQQPKASQTPVPPGAPSPDKDPAKESPKPEEQKNTPREVSPLLPKLPEEPEAESKSADSLYDPFIVPKVQYKLVCRKCQAGFSDEEAARSHLKSLCFFGQSVVNLQEMVLHVPTGGGGGGSGGGGGGGGGGGGGGSYHCLACESALCGEEALSQHLESALHKHRTITRAARNAKEHPSLLPHSACFPDPSTASTSQSAAHSNDSPPPPSAAAPSSASPHASRKSWPQVVSRASAAKPPSFPPLSSSSTVTSSSCSTSGVQPSMPTDDYSEESDTDLSQKSDGPASPVEGPKDPSCPKDSGLTSVGTDTFRL

SEQ ID NO: 15917 - protein, 3567 aa, Homo sapiens
METCDSPPISRQENGQSTSKLCGTTQLDNEVPEKVAGMEPDRENSSTDDNLKTDERKSEALLGFSVENAAATQVTSAKEIPCNECATSFPSLQKYMEHHCPNARLPVLKDDNESEISELEDSDVENLTGEIVYQPDGSAYIIEDSKESGQNAQTGANSKLFSTAMFLDSLASAGEKSDQSASAPMSFYPQIINTFHIASSLGKPFTADQAFPNTSALAGVGPVLHSFRVYDLRHKREKDYLTSDGSAKNSCVSKDVPNNVDLSKFDGCVSDGKRKPVLMCFLCKLSFGYIRSFVTHAVHDHRMTLNDEEQKLLSNKCVSAIIQGIGKDKEPLISFLEPKKSTSVYPHFSTTNLIGPDPTFRGLWSAFHVENGDSLPAGFAFLKGSASTSSSAEQPLGITQMPKAEVNLGGLSSLVVNTPITSVSLSHSSSESSKMSESKDQENNCERPKESNVLHPNGECPVKSEPTEPGDEDEEDAYSNELDDEEVLGELTDSIGNKDFPLLNQSISPLSSSVLKFIEKGTSSSSATVSDDTEKKKQTAAVRASGSVASNYGISGKDFADASASKDSATAAHPSEIARGDEDSSATPHQHGFTPSTPGTPGPGGDGSPGSGIECPKCDTVLGSSRSLGGHMTMMHSRNSCKTLKCPKCNWHYKYQQTLEAHMKEKHPEPGGSCVYCKTGQPHPRLARGESYTCGYKPFRCEVCNYSTTTKGNLSIHMQSDKHLNNVQNLQNGNGEQVFGHSAPAPNTSLSGCGTPSPSKPKQKPTWRCEVCDYETNVARNLRIHMTSEKHMHNMMLLQQNMKQIQHNLHLGLAPAEAELYQYYLAQNIGLTGMKLENPADPQLMINPFQLDPATAAALAPGLGELSPYISDPALKLFQCAVCNKFTSDSLEALSVHVSSERSLPEEEWRAVIGDIYQCKLCNYNTQLKANFQLHCKTDKHMQKYQLVAHIKEGGKSNEWRLKCIAIGNPVHLKCNACDYYTNSVDKLRLHTTNHRHEAALKLYKHLQKQEGAVNPESCYYYCAVCDYTTKVKLNLVQHVRSVKHQQTEGLRKLQLHQQGLAPEEDNLSEIFFVKDCPPNELETASLGARTCDDDLTEQHEEAEGAIKPTAVAEDDEKDTSERDNSEGKNSNKDSVSVAGGTQPLLLAKEEDVATKRSKPTEDNKFCHEQFYQCPYCNYNSRDQSRIQMHVLSQHSVQPVICCPLCQDVLSNKMHLQLHLTHLHSVSPDCVEKLLMTVPVPDVMMPNSMLLPAAASEKSERDTPAAVTAEGSGKYSGESPMDDKSMAGLEDSKANVEVKNEEQKPTKEPLEVSEWNKNSSKDVKIPDTLQDQLNEQQKRQPLSVSDRHVYKYRCNHCSLAFKTMQKLQIHSQYHAIRAATMCNLCQRSFRTFQALKKHLEAGHPELSEAELQQLYASLPVNGELWAESETMSQDDHGLEQEMEREYEVDHEGKASPVGSDSSSIPDDMGSEPKRTLPFRKGPNFTMEKFLDPSRPYKCTVCKESFTQKNILLVHYNSVSHLHKLKKVLQEASSPVPQETNSNTDNKPYKCSICNVAYSQSSTLEIHMRSVLHQTKARAAKLEPSGHVAGGHSIAANVNSPGQGMLDSMSLAAVNSKDTHLDAKELNKKQTPDLISAQPAHHPPQSPAQIQMQLQHELQQQAAFFQPQFLNPAFLPHFPMTPEALLQFQQPQFLFPFYIPGTEFSLGPDLGLPGSATFGMPGMTGMAGSLLEDLKQQIQTQHHVGQTQLQILQQQAQQYQATQPQLQPQKQQQQPPPPQQQQQQQASKLLKQEQSNIVSADCQIMKDVPSYKEAEDISEKPEKPKQEFISEGEGLKEGKDTKKQKSLEPSIPPPRIASGARGNAAKALLENFGFELVIQYNENRQKVQKKGKSGEGENTDKLECGTCGKLFSNVLILKSHQEHVHGQFFPYAALEKFARQYREAYDKLYPISPSSPETPPPPPPPPPLPPAPPQPSSMGPVKIPNTVSTPLQAPPPTPPPPPPPPPPPPPPPPPPPPSAPPQVQLPVSLDLPLFPSIMMQPVQHPALPPQLALQLPQMDALSADLTQLCQQQLGLDPNFLRHSQFKRPRTRITDDQLKILRAYFDINNSPSEEQIQEMAEKSGLSQKVIKHWFRNTLFKERQRNKDSPYNFSNPPITVLEDIRIDPQPTSLEHYKSDASFSKRSSRTRFTDYQLRVLQDFFDTNAYPKDDEIEQLSTVLNLPTRVIVVWFQNARQKARKSYENQAETKDNEKRELTNERYIRTSNMQYQCKKCNVVFPRIFDLITHQKKQCYKDEDDDAQDESQTEDSMDATDQVVYKHCTVSGQTDAAKNAAAPAASSGSGTSTPLIPSPKPEPEKTSPKPEYPAEKPKQSDPSPPSQGTKPALPLASTSSDPPQASTAQPQPQPQPPKQPQLIGRPPSASQTPVPSSPLQISMTSLQNSLPPQLLQYQCDQCTVAFPTLELWQEHQHMHFLAAQNQFLHSPFLERPMDMPYMIFDPNNPLMTGQLLGSSLTQMPPQASSSHTTAPTTVAASLKRKLDDKEDNNCSEKEGGNSGEDQHRDKRLRTTITPEQLEILYEKYLLDSNPTRKMLDHIAREVGLKKRVVQVWFQNTRARERKGQFRAVGPAQSHKRCPFCRALFKAKSALESHIRSRHWNEGKQAGYSLPPSPLISTEDGGESPQKYIYFDYPSLPLTKIDLSSENELASTVSTPVSKTAELSPKNLLSPSSFKAECSEDVENLNAPPAEAGYDQNKTDFDETSSINTAISDATTGDEGNTEMESTTGSSGDVKPALSPKEPKTLDTLPKPATTPTTEVCDDKFLFSLTSPSIHFNDKDGDHDQSFYITDDPDDNADRSETSSIADPSSPNPFGSSNPFKSKSNDRPGHKRFRTQMSNLQLKVLKACFSDYRTPTMQECEMLGNEIGLPKRVVQVWFQNARAKEKKFKINIGKPFMINQGGTEGTKPECTLCGVKYSARLSIRDHIFSKQHISKVRETVGSQLDREKDYLAPTTVRQLMAQQELDRIKKASDVLGLTVQQPGMMDSSSLHGISLPTAYPGLPGLPPVLLPGMNGPSSLPGFPQNSNISAGMLGFPTSATSSPALSLSSAPTKPLLQTPPPPPPPPPPPPSSSLSGQQTEQQNKESEKKQTKPNKVKKIKEEELEATKPEKHPKKEEKISSALSVLGKVVGETHVDPIQLQALQNAIAGDPASFIGGQFLPYFIPGFASYFTPQLPGTVQGGYFPPVCGMESLFPYGPTMPQTLAGLSPGALLQQYQQYQQNLQESLQKQQKQQQEQQQKPVQAKTSKVESDQPQNSNDASETKEDKSTATESTKEEPQLESKSADFSDTYVVPFVKYEFICRKCQMMFTDEDAAVNHQKSFCYFGQPLIDPQETVLRVPVSKYQCLACDVAISGNEALSQHLQSSLHKEKTIKQAMRNAKEHVRLLPHSVCSPNPNTTSTSQSAASSNNTYPHLSCFSMKSWPNILFQASARRAASPPSSPPSLSLPSTVTSSLCSTSGVQTSLPTESCSDESDSELSQKLEDLDNSLEVKAKPASGLDGNFNSIRMDMFSV

SEQ ID NO: 15918 - protein, 407 aa, Homo sapiens
MNKSQGSVSFTDVTVDFTQEEWEQLDPSQRILYMDVMLENYSNLLSVEVWKADDQMERDHRNPDEQARQFLILKNQTPIEERGDLFGKALNLNTDFVSLRQVPYKYDLYEKTLKYNSDLLNSNRSYAGKQTDECNEFGKALLYLKQEKTHSGVEYSEYNKSGKALSHKAAIFKHQKIKNLVQPFICTYCDKAFSFKSLLISHKRIHTGEKPYECNVCKKTFSHKANLIKHQRIHTGEKPFECPECGKAFTHQSNLIVHQRAHMEKKPYECSECGKTFAQKFELTTHQRIHTGERPYECNECAKTFFKKSNLIIHQKIHTGEKRYECSECGKSFIQNSQLIIHMRTHTGEKPYECTECGKTFSQRSTLRLHLRIHTGEKPYECSECGKAFSRKSRLSVHQRVHIGEKP

SEQ ID NO: 15919 - protein, 533 aa, Homo sapiens
MAHGSVTFRDVAIDFSQEEWEFLDPAQRDLYRDVMWENYSNFISLGPSISKPDVITLLDEERKEPGMVVREGTRRYCPDLESRYRTNTLSPEKDIYEIYSFQWDIMERIKSYSLQGSIFRNDWECKSKIEGEKEQQEGYFGQVKITSEKMTTYKRHNFLTEYQIVHNGEKVYECKECRKTFIRRSTLSQHLRIHTGEKPYKCKECGQAFRQRAHLIRHHKLHTGEKPYECKECGKAFTVLQELTQHQRLHTGEKPYECKECGKAFRVHQQLARHQRIHTGEKPYECKDCGKTFRQCTHLTRHQRLHTAEKLYECKECGKAFVCGPDLRVHQKIHFGEKPYECKECGKAFRICQQLTVHQSIHTGEKPYECKECGKTFRLRQQLVRHQRIHTREKPYECMECWKTFSSYSQLISHQSIHIGERPYECEECGKAFRLLSQLTQHQSIHTGEKPYECKECRKPFRLLSQLTQHQSIHTGEKPYECKECGKAFRLYSFLTQHQRIHTGEKPYKCKECKKAFRQHSHLTQHQKIHNGI

SEQ ID NO: 15920 - protein, 461 aa, Homo sapiens
MEREGIWHSTLGETWEPNNWLEGQQDSHLSQVGVTHKETFTEMRVCGGNEFERCSSQDSILDTQQSIPMVKRPHNCNSHGEDATQNSELIKTQRMFVGKKIYECNQCSKTFSQSSSLLKHQRIHTGEKPYKCNVCGKHFIERSSLTVHQRIHTGEKPYKCNECGKAFSQSMNLTVHQRTHTGEKPYQCKECGKAFHKNSSLIQHERIHTGEKPYKCNECGKAFTQSMNLTVHQRTHTGEKPYECNECGKAFSQSMHLIVHQRSHTGEKPYECSQCGKAFSKSSTLTLHQRNHTGEKPYKCNKCGKSFSQSTYLIEHQRLHSGVKPFECNECGKAFSKNSSLTQHRRIHTGEKPYECMVCGKHFTGRSSLTVHQVIHTGEKPYECNECGKAFSQSAYLIEHQRIHTGEKPYECDQCGKAFIKNSSLTVHQRTHTGEKPYQCNECGKAFSRSTNLTRHQRTHT

SEQ ID NO: 15921 - protein, 868 aa, Homo sapiens
MRGAASASVREPTPLPGRGAPRTKPRAGRGPTVGTPATLALPARGRPRSRNGLASKGQRGAAPTGPGHRALPSRDTALPQERNKKLEAVGTGIEPKAMSQGLVTFGDVAVDFSQEEWEWLNPIQRNLYRKVMLENYRNLASLGLCVSKPDVISSLEQGKEPWTVKRKMTRAWCPDLKAVWKIKELPLKKDFCEGKLSQAVITERLTSYNLEYSLLGEHWDYDALFETQPGLVTIKNLAVDFRQQLHPAQKNFCKNGIWENNSDLGSAGHCVAKPDLVSLLEQEKEPWMVKRELTGSLFSGQRSVHETQELFPKQDSYAEGVTDRTSNTKLDCSSFRENWDSDYVFGRKLAVGQETQFRQEPITHNKTLSKERERTYNKSGRWFYLDDSEEKVHNRDSIKNFQKSSVVIKQTGIYAGKKLFKCNECKKTFTQSSSLTVHQRIHTGEKPYKCNECGKAFSDGSSFARHQRCHTGKKPYECIECGKAFIQNTSLIRHWRYYHTGEKPFDCIDCGKAFSDHIGLNQHRRIHTGEKPYKCDVCHKSFRYGSSLTVHQRIHTGEKPYECDVCRKAFSHHASLTQHQRVHSGEKPFKCKECGKAFRQNIHLASHLRIHTGEKPFECAECGKSFSISSQLATHQRIHTGEKPYECKVCSKAFTQKAHLAQHQKTHTGEKPYECKECGKAFSQTTHLIQHQRVHTGEKPYKCMECGKAFGDNSSCTQHQRLHTGQRPYECIECGKAFKTKSSLICHRRSHTGEKPYECSVCGKAFSHRQSLSVHQRIHSGKKPYECKECRKTFIQIGHLNQHKRVHTGERSYNYKKSRKVFRQTAHLAHHQRIHTGESSTCPSLPSTSNPVDLFPKFLWNPSSLPSP

SEQ ID NO: 15922 - protein, 502 aa, Homo sapiens
MGTENKEVIPKEEISEESEPHGSLLEKFPKVVYQGHEFGAGCEEDMLEGHSRESMEEVIEQMSPQERDFPSGLMIFKKSPSSEKDRENNESERGCSPSPNLVTHQGDTTEGVSAFATSGQNFLEILESNKTQRSSVGEKPHTCKECGKAFNQNSHLIQHMRVHSGEKPFECKECGKTFGTNSSLRRHLRIHAGEKPFACNECGKAFIQSSHLIHHHRIHTGERPYKCEECGKAFSQNSALILHQRIHTGEKPYECNECGKTFRVSSQLIQHQRIHTEERYHECNECGKAFKHSSGLIRHQKIHTGEKPYLCNECGKGFGQSSELIRHQRIHTGDKPYECNECGKTFGQNSEIIRHIRIHTGEKPYVCKECGKAFRGNSELLRHERIHTGEKPYECFECGKAFRRTSHLIVHQRIHTGEKPHQCNECARTFWDNSELLLHQKIHIGEKPYECSECEKTFSQHSQLIIHQRIHTGEKPYECQECQKTFSRSSHLLRHQSVHCME

SEQ ID NO: 15923 - protein, 519 aa, Homo sapiens
MARDLVMFRDVAVDFSQEEWECLNSYQRNLYRDVILENYSNLVSLAGCSISKPDVITLLEQGKEPWMVVRDEKRRWTLDLESRYDTKKLFQGKDIYEMNLSQWKVMERIKSCGLEEQESPHEVCFRQVTKTTSEKMPTYRKLTSLPLYQKSHNREKPYECGECGKAFRVRQQLTFHQRIHTGEKPYECKECGKAFRQCAHLSRHQRIHTSDKLYECKKCGKIFTCGSDLRVHQRIHIGEKPYECKECGKAFRVRGQLNLHQRIHTGEKPYECKECGKAFRQYAHLTRHQRLNIAEKCYECKECGQAFLCSTGLRLHHKLHTGEKPYECKECGKAFRVRQQLTLHQRIHTGEKPYDCKECGKTFSRGYHLTLHQRIHTGEKPYECKECQKFFRRYSELISHQGIHIGEKPYECKECGKAFRLFSQLTQHQSIHFGEKPFKCKECEKTFRLLSQLTQHQSIHTGEKPYDCKECGKAFRLHSSLIQHQRIHSGEKPYKCKECKKAFRQHSHLTYHQRIHNVT

SEQ ID NO: 15924 - protein, 338 aa, Homo sapiens
MTTTLVSATIFDLSEVLCKGNKMLNYSAPSAGGCLLDRKAVGTPAGGGFPRRHSVTLPSSKFHQNQLLSSLKGEPAPALSSRDSRFRDRSFSEGGERLLPTQKQPGGGQVNSSRYKTELCRPFEENGACKYGDKCQFAHGIHELRSLTRHPKYKTELCRTFHTIGFCPYGPRCHFIHNAEERRALAGARDLSADRPRLQHSFSFAGFPSAAATAAATGLLDSPTSITPPPILSADDLLGSPTLPDGTNNPFAFSSQELASLFAPSMGLPGGGSPTTFLFRPMSESPHMFDSPPSPQDSLSDQEGYLSSSSSSHSGSDSPTLDNSRRLPIFSRLSISDD

SEQ ID NO: 15925 - protein, 494 aa, Homo sapiens
MSTTLLSAFYDVDFLCKTEKSLANLNLNNMLDKKAVGTPVAAAPSSGFAPGFLRRHSASNLHALAHPAPSPGSCSPKFPGAANGSSCGSAAAGGPTSYGTLKEPSGGGGTALLNKENKFRDRSFSENGDRSQHLLHLQQQQKGGGGSQINSTRYKTELCRPFEESGTCKYGEKCQFAHGFHELRSLTRHPKYKTELCRTFHTIGFCPYGPRCHFIHNADERRPAPSGGASGDLRAFGTRDALHLGFPREPRPKLHHSLSFSGFPSGHHQPPGGLESPLLLDSPTSRTPPPPSCSSASSCSSSASSCSSASAASTPSGAPTCCASAAAAAAAALLYGTGGAEDLLAPGAPCAACSSASCANNAFAFGPELSSLITPLAIQTHNFAAVAAAAYYRSQQQQQQQGLAPPAQPPAPPSATLPAGAAAPPSPPFSFQLPRRLSDSPVFDAPPSPPDSLSDRDSYLSGSLSSGSLSGSESPSLDPGRRLPIFSRLSISDD

SEQ ID NO: 15926 - protein, 630 aa, Homo sapiens
MSVSSGVQILTKPETVDRRRSAETTKEAGRPLEMAVSEPEASAAEWKQLDPAQSNLYNDVMLENYCNQASMGCQAPKPDMISKLEKGEAPWLGKGKRPSQGCPSKIARPKQKETDGKVQKDDDQLENIQKSQNKLLREVAVKKKTQAKKNGSDCGSLGKKNNLHKKHVPSKKRLLKFESCGKILKQNLDLPDHSRNCVKRKSDAAKEHKKSFNHSLSDTRKGKKQTGKKHEKLSSHSSSDKCNKTGKKHDKLCCHSSSHIKQDKIQTGEKHEKSPSLSSSTKHEKPQACVKPYECNQCGKVLSHKQGLIDHQRVHTGEKPYECNECGIAFSQKSHLVVHQRTHTGEKPYECIQCGKAHGHKHALTDHLRIHTGEKPYECAECGKTFRHSSNLIQHVRSHTGEKPYECKECGKSFRYNSSLTEHVRTHTGEIPYECNECGKAFKYSSSLTKHMRIHTGEKPFECNECGKAFSKKSHLIIHQRTHTKEKPYKCNECGKAFGHSSSLTYHMRTHTGESPFECNQCGKGFKQIEGLTQHQRVHTGEKPYECNECGKAFSQKSHLIVHQRTHTGEKPYECNECEKAFNAKSQLVIHQRSHTGEKPYECNECGKTFKQNASLTKHVKTHSEDKSHE

SEQ ID NO: 15927 - protein, 198 aa, Homo sapiens
MEKPAGRKKKTPTPREEADVQKSALREEKVSGDRKPPERPTVPRKPRTEPCLSPEDEEHVFDAFDASFKDDFEGVPVFIPFQRKKPYECSECGRIFKHKTDHIRHQRVHTGEKPFKCAQCGKAFRHSSDVTKHQRTHTGEKPFKCGECGKAFNCGSNLLKHQKTHTGEKPYECTHCGKAFAYSSCLIRHQKRHPRKKP

SEQ ID NO: 15928 - protein, 310 aa, Homo sapiens
MSQQLKKRAKTRHQKGLGGRAPSGAKPRQGKSSQDLQAEIEPVSAVWALCDGYVCYEPGPQALGGDDFSDCYIECVIRGEFSQPILEEDSLFESLEYLKKGSEQQLSQKVFEASSLECSLEYMKKGVKKELPQKIVGENSLEYSEYMTGKKLPPGGIPGIDLSDPKQLAEFARKKPPINKEYDSLSAIACPQSGCTRKLRNRAALRKHLLIHGPRDHVCAECGKAFVESSKLKRHFLVHTGEKPFRCTFEGCGKRFSLDFNLRTHVRIHTGEKRFVCPFQGCNRRFIQSNNLKAHILTHANTNKNEQEGK

SEQ ID NO: 15929 - protein, 452 aa, Homo sapiens
MAAGEPRSLLFFQKPVTFEDVAVNFTQEEWDCLDASQRVLYQDVMSETFKNLTSVARIFLHKPELITKLEQEEEQWRETRVLQASQAGPPFFCYTCGKCFSRRSYLYSHQFVHNPKLTNSCSQCGKLFRSPKSLSYHRRMHLGERPFCCTLCDKTYCDASGLSRHRRVHLGYRPHSCSVCGKSFRDQSELKRHQKIHQNQEPVDGNQECTLRIPGTQAEFQTPIARSQRSIQGLLDVNHAPVARSQEPIFRTEGPMAQNQASVLKNQAPVTRTQAPITGTLCQDARSNSHPVKPSRLNVFCCPHCSLTFSKKSYLSRHQKAHLTEPPNYCFHCSKSFSSFSRLVRHQQTHWKQKSYLCPICDLSFGEKEGLMDHWRGYKGKDLCQSSHHKCRVILGQWLGFSHDVPTMAGEEWKHGGDQSPPRIHTPRRRGLREKACKGDKTKEAVSILKHK

SEQ ID NO: 15930 - protein, 900 aa, Homo sapiens
MSHLKTSTEDEEPTEEYENVGNAASKWPKVEDPMPESKVGDTCVWDSKVENQQKKPVENRMKEDKSSIREAISKAKSTANIKTEQEGEASEKSLHLSPQHITHQTMPIGQRGSEQGKRVENINGTSYPSLQQKTNAVKKLHKCDECGKSFKYNSRLVQHKIMHTGEKRYECDDCGGTFRSSSSLRVHKRIHTGEKPYKCEECGKAYMSYSSLINHKSTHSGEKNCKCDECGKSFNYSSVLDQHKRIHTGEKPYECGECGKAFRNSSGLRVHKRIHTGEKPYECDICGKTFSNSSGLRVHKRIHTGEKPYECDECGKAFITCRTLLNHKSIHFGDKPYKCDECEKSFNYSSLLIQHKVIHTGEKPYECDECGKAFRNSSGLIVHKRIHTGEKPYKCDVCGKAFSYSSGLAVHKSIHPGKKAHECKECGKSFSYNSLLLQHRTIHTGERPYVCDVCGKTFRNNAGLKVHRRLHTGEKPYKCDVCGKAYISRSSLKNHKGIHLGEKPYKCSYCEKSFNYSSALEQHKRIHTREKPFGCDECGKAFRNNSGLKVHKRIHTGERPYKCEECGKAYISLSSLINHKSVHPGEKPFKCDECEKAFITYRTLTNHKKVHLGEKPYKCDVCEKSFNYTSLLSQHRRVHTREKPYECDRCEKVFRNNSSLKVHKRIHTGERPYECDVCGKAYISHSSLINHKSTHPGRTPHTCDECGKAFFSSRTLISHKRVHLGEKPFKCVECGKSFSYSSLLSQHKRIHTGEKPYVCDRCGKAFRNSSGLTVHKRIHTGEKPYECDECGKAYISHSSLINHKSVHQGKQPYNCECGKSFNYRSVLDQHKRIHTGKKPYRCNECGKAFNIRSNLTKHKRTHTGEESLNVIYVGSYSGTSQKRTYEGGNALDGGRMRMPL

SEQ ID NO: 15931 - protein, 681 aa, Homo sapiens
MNASSEGESFAGSVQIPGGTTVLVELTPDIHICGICKQQFNNLDAFVAHKQSGCQLTGTSAAAPSTVQFVSEETVPATQTQTTTRTITSETQTITVSAPEFVFEHGYQTYLPTESNENQTATVISLPAKSRTKKPTTPPAQKRLNCCYPGCQFKTAYGMKDMERHLKIHTGDKPHKCEVCGKCFSRKDKLKTHMRCHTGVKPYKCKTCDYAAADSSSLNKHLRIHSDERPFKCQICPYASRNSSQLTVHLRSHTGDAPFQCWLCSAKFKISSDLKRHMRVHSGEKPFKCEFCNVRCTMKGNLKSHIRIKHSGNNFKCPHCDFLGDSKATLRKHSRVHQSEHPEKCSECSYSCSSKAALRIHERIHCTDRPFKCNYCSFDTKQPSNLSKHMKKFHGDMVKTEALERKDTGRQSSRQVAKLDAKKSFHCDICDASFMREDSLRSHKRQHSEYSESKNSDVTVLQFQIDPSKQPATPLTVGHLQVPLQPSQVPQFSEGRVKIIVGHQVPQANTIVQAAAAAVNIVPPALVAQNPEELPGNSRLQILRQVSLIAPPQSSRCPSEAGAMTQPAVLLTTHEQTDGATLHQTLIPTASGGPQEGSGNQTFITSSGITCTDFEGLNALIQEGTAEVTVVSDGGQNIAVATTAPPVFSSSSQQELPKQTYSIIQGAAHPALLCPADSIPD

SEQ ID NO: 15932 - protein, 645 aa, Homo sapiens
MNASSEGESFAGSVQIPGGTTVLVELTPDIHICGICKQQFNNLDAFVAHKQSGCQLTGTSAAAPSTVQFVSEETVPATQTQTTTRTITSETQTITVSAPEFVFEHGYQTYLPTESNENQTATVISLPAKSRTKKPTTPPAQKRLNCCYPGCQFKTAYGMKDMERHLKIHTGDKPHKCEVCGKCFSRKDKLKTHMRCHTGVKPYKCKTCDYAAADSSSLNKHLRIHSDERPFKCQICPYASRNSSQLTVHLRSHTASELDDDVPKANCLSTESTDTPKAPVITLPSEAREQMATLGERTFNCCYPGCHFKTVHGMKDLDRHLRIHTGDKPHKCEFCDKCFSRKDNLTMHMRCHTSVKPHKCHLCDYAAVDSSSLKKHLRIHSDERPYKCQLCPYASRNSSQLTVHLRSHTGDTPFQCWLCSAKFKISSDLKRHMIVHSGEKPFKCEFCDVRCTMKANLKSHIRIKHTFKCLHCAFQGRDRADLLEHSRLHQADHPEKCPECSYSCSSAAALRVHSRVHCKDRPFKCDFCSFDTKRPSSLAKHVDKVHRDEAKTENRAPLGKEGLREGSSQHVAKIVTQRAFRCETCGASFVRDDSLRCHKKQHSDQSENKNSDLVTFPPESGASGQLSTLVSVGQLEAPLEPSQDL

SEQ ID NO: 15933 - protein, 526 aa, Homo sapiens
MPQQLLITLPTEASTWVKLQHPKKAVEGAPLWEDVTKMFEGEALLSQDAEDVKTQRESLEDEVTPGLPTAESQELLTFKDISIDFTQEEWGQLAPAHQNLYREVMLENYSNLVSVGYQLSKPSVISQLEKGEEPWMAEKEGPGDPSSDLKSKIETIESTAKSTISQERLYHGIMMESFMRDDIIYSTLRKVSTYDDVLERHQETCMRDVRQAILTHKKRVQETNKFGENIIVHSNVIIEQRHHKYDTPTKRNTYKLDLINHPTSYIRTKTYECNICEKIFKQPIHLTEHMRIHTGEKPFRCKECGRAFSQSASLSTHQRIHTGEKPFECEECGKAFRHRSSLNQHHRTHTGEKPYVCDKCQKAFSQNISLVQHLRTHSGEKPFTCNECGKTFRQIRHLSEHIRIHTGEKPYACTACCKTFSHRAYLTHHQRIHTGERPYKCKECGKAFRQRIHLSNHKTVHTGVKAYECNRCGKAYRHDSSFKKHQRHHTGEKPYECNECGKAFSYNSSLSRHHEIHRRNAFRNKV

SEQ ID NO: 15934 - protein, 534 aa, Homo sapiens
MLQQLLITLPTEASTWVKLRHPKAATERVALWEDVTKMFKAEALLSQDADETQGESLESRVTLGSLTAESQELLTFKDVSVDFTQEEWGQLAPAHRNLYREVMLENYGNLVSVGCQLSKPGVISQLEKGEEPWLMERDISGVPSSDLKSKTKTKESALQNDISWEELHCGLMMERFTKGSSMYSTLGRISKCNKLESQQENQRMGKGQIPLMCKKTFTQERGQESNRFEKRINVKSEVMPGPIGLPRKRDRKYDTPGKRSRYNIDLVNHSRSYTKMKTFECNICEKIFKQLIHLTEHMRIHTGEKPFRCKECGKAFSQSSSLIPHQRIHTGEKPYECKECGKTFRHPSSLTQHVRIHTGEKPYECRVCEKAFSQSIGLIQHLRTHVREKPFTCKDCGKAFFQIRHLRQHEIIHTGVKPYICNVCSKTFSHSTYLTQHQRTHTGERPYKCKECGKAFSQRIHLSIHQRVHTGVKPYECSHCGKAFRHDSSFAKHQRIHTGEKPYDCNECGKAFSCSSSLIRHCKTHLRNTFSNVV

SEQ ID NO: 15935 - protein, 532 aa, Homo sapiens
MALRSVMFSDVSIDFSPEEWEYLDLEQKDLYRDVMLENYSNLVSLGCFISKPDVISSLEQGKEPWKVVRKGRRQYPDLETKYETKKLSLENDIYEINLSQWKIMERIENHGLKGLILKNDWESTGKIEGQERPQEGYFSSVKMPSEKVSSYQKRTSVTPHQRLHFVDKPYECKECGKAFRVRQQLTFHHRIHTGEKPYECKECGMAFRQTAHLTRHQRLHSGEKLYECKECGEAFICGADLRVHQKMHIGEKPYECKECGKAFRVRGQLTLHQRIHTGEKPYVCKECGKAFRQYAHLTRHQKLNSADRLYECKECGKAFLCGSGLRVHHKLHTGEKPYECKECGKAFRVRQQLTLHQRIHTGEKPYECKECGKTFSRGYHLILHHRIHTGEKPYECKECWKAFSRYSQLISHQSIHIGVKPYDCKECGKAFRLLSQLTQHQSIHIGEKPYKCKECGKAFRLRQKLTLHQSIHTGEKPFECKECRKAFRLNSSLIQHLRIHSGEKPYECKECKKAFRQHSHLTHHLKIHNVKI

SEQ ID NO: 15936 - protein, 636 aa, Homo sapiens
MAPRPPTAAPQESVTFKDVSVDFTQEEWYHVDPAQRSLYRDVMLENYSHLVSLGYQVSKPEVIFKLEQGEEPWISEGEIQRPFYPDWKTRPEVKSSHLQQDVSEVSHCTHDLLHATLEDSWDVSSQLDRQQENWKRHLGSEASTQKKIITPQENFEQNKFGENSRLNTNLVTQLNIPARIRPSECETLGSNLGHNADLLNENNILAKKKPYKCDKCRKAFIHRSSLTKHEKTHKGEGAFPNGTDQGIYPGKKHHECTDCGKTFLWKTQLTEHQRIHTGEKPFECNVCGKAFRHSSSLGQHENAHTGEKPYQCSLCGKAFQRSSSLVQHQRIHTGEKPYRCNLCGRSFRHGTSLTQHEVTHSGEKPFQCKECGKAFSRCSSLVQHERTHTGEKPFECSICGRAFGQSPSLYKHMRIHKRGKPYQSSNYSIDFKHSTSLTQDESTLTEVKSYHCNDCGEDFSHITDFTDHQRIHTAENPYDCEQAFSQQAISHPGEKPYQCNVCGKAFKRSTSFIEHHRIHTGEKPYECNECGEAFSRRSSLTQHERTHTGEKPYECIDCGKAFSQSSSLIQHERTHTGEKPYECNECGRAFRKKTNLHDHQRIHTGEKPYSCKECGKNFSRSSALTKHQRIHTRNKL

SEQ ID NO: 15937 - protein, 570 aa, Homo sapiens
MPGETEEPRPPEQQDQEGGEAAKAAPEEPQQRPPEAVAAAPAGTTSSRVLRGGRDRGRAAAAAAAAAVSRRRKAEYPRRRRSSPSARPPDVPGQQPQAAKSPSPVQGKKSPRLLCIEKVTTDKDPKEEKEEEDDSALPQEVSIAASRPSRGWRSSRTSVSRHRDTENTRSSRSKTGSLQLICKSEPNTDQLDYDVGEEHQSPGGISSEEEEEEEEEMLISEEEIPFKDDPRDETYKPHLERETPKPRRKSGKVKEEKEKKEIKVEVEVEVKEEENEIREDEEPPRKRGRRRKDDKSPRLPKRRKKPPIQYVRCEMEGCGTVLAHPRYLQHHIKYQHLLKKKYVCPHPSCGRLFRLQKQLLRHAKHHTDQRDYICEYCARAFKSSHNLAVHRMIHTGEKPLQCEICGFTCRQKASLNWHMKKHDADSFYQFSCNICGKKFEKKDSVVAHKAKSHPEVLIAEALAANAGALITSTDILGTNPESLTQPSDGQGLPLLPEPLGNSTSGECLLLEAEGMSKSYCSGTERVSLMADGKIFVGSGSSGGTEGLVMNSDILGATTEVLIEDSDSAGP

SEQ ID NO: 15938 - protein, 416 aa, Homo sapiens
MAAILLTTRPKVPVSFEDVSVYFTKTEWKLLDLRQKVLYKRVMLENYSHLVSLGFSFSKPHLISQLERGEGPWVADIPRTWATAGLHIGDRTQSKTSTSTQKHSGRQLPGADPQGGKEGQAARSSVLQRGAQGLGQSSAAGPQGPKGAEKRYLCQQCGKAFSRSSNLIKHRIIHSGEKPYACPECGKLFRRSFALLEHQRIHSGEKPYACPECSKTFTRSSNLIKHQVIHSGERPFACGDCGKLFRRSFALLEHARVHSGERPYACPECGKAFSRSSNLIEHQRTHRGEKPYACGQCAKAFKGVSQLIHHQRSHSGERPFACRECGKAFRGRSGLSQHRRVHSGEKPYECSDCGKAFGRRANLFKHQAVHGARRPAKAETARRLAGPGSTGPGSAVAATSPPRPSTAARPSRPSRR

SEQ ID NO: 15939 - protein, 1006 aa, Homo sapiens
MSRRKQSNPRQIKRSLGDMEAREEVQLVGASHMEQKATAPEAPSPPSADVNSPPPLPPPTSPGGPKELEGQEPEPRPTEEEPGSPWSGPDELEPVVQDGQRRIRARLSLATGLSWGPFHGSVQTRASSPRQAEPSPALTLLLVDEACWLRTLPQALTEAEANTEIHRKDDALWCRVTKPVPAGGLLSVLLTAEPHSTPGHPVKKEPAEPTCPAPAHDLQLLPQQAGMASILATAVINKDVFPCKDCGIWYRSERNLQAHLLYYCASRQGTGSPAAAATDEKPKETYPNERVCPFPQCRKSCPSASSLEIHMRSHSGERPFVCLICLSAFTTKANCERHLKVHTDTLSGVCHSCGFISTTRDILYSHLVTNHMVCQPGSKGEIYSPGAGHPATKLPPDSLGSFQQQHTALQGPLASADLGLAPTPSPGLDRKALAEATNGEARAEPLAQNGGSSEPPAAPRSIKVEAVEEPEAAPILGPGEPGPQAPSRTPSPRSPAPARVKAELSSPTPGSSPVPGELGLAGALFLPQYVFGPDAAPPASEILAKMSELVHSRLQQGAGAGAGGAQTGLFPGAPKGATCFECEITFSNVNNYYVHKRLYCSGRRAPEDAPAARRPKAPPGPARAPPGQPAEPDAPRSSPGPGAREEGAGGAATPEDGAGGRGSEGSQSPGSSVDDAEDDPSRTLCEACNIRFSRHETYTVHKRYYCASRHDPPPRRPAAPPGPPGPAAPPAPSPAAPVRTRRRRKLYELHAAGAPPPPPPGHAPAPESPRPGSGSGSGPGLAPARSPGPAADGPIDLSKKPRRPLPGAPAPALADYHECTACRVSFHSLEAYLAHKKYSCPAAPPPGALGLPAAACPYCPPNGPVRGDLLEHFRLAHGLLLGAPLAGPGVEARTPADRGPSPAPAPAASPQPGSRGPRDGLGPEPQEPPPGPPPSPAAAPEAVPPPPAPPSYSDKGVQTPSKGTPAPLPNGNHRYCRLCNIKFSSLSTFIAHKKYYCSSHAAEHVK

SEQ ID NO: 15940 - protein, 1151 aa, Homo sapiens
MSRRKQSKPRQIKRPLEDAIEDEEEECPSEETDIISKGDFPLEESFSTEFGPENLSCEEVEYFCNKGDDEGIQETAESDGDTQSEKPGQPGVETDDWDGPGELEVFQKDGERKIQSRQQLPVGTTWGPFPGKMDLNNNSLKTKAQVPMVLTAGPKWLLDVTWQGVEDNKNNCIVYSKGGQLWCTTTKAISEGEELIAFVVDFDSRLQAASQMTLTEGMYPARLLDSIQLLPQQAAMASILPTAIVNKDIFPCKSCGIWYRSERNLQAHLMYYCSGRQREAAPVSEENEDSAHQISSLCPFPQCTKSFSNARALEMHLNSHSGVKMEEFLPPGASLKCTVCSYTADSVINFHQHLFSHLTQAAFRCNHCHFGFQTQRELLQHQELHVPSGKLPRESDMEHSPSATEDSLQPATDLLTRSELPQSQKAMQTKDASSDTELDKCEKKTQLFLTNQRPEIQPTTNKQSFSYTKIKSEPSSPRLASSPVQPNIGPSFPVGPFLSQFSFPQDITMVPQASEILAKMSELVHRRLRHGSSSYPPVIYSPLMPKGATCFECNITFNNLDNYLVHKKHYCSSRWQQMAKSPEFPSVSEKMPEALSPNTGQTSINLLNPAAHSADPENPLLQTSCINSSTVLDLIGPNGKGHDKDFSTQTKKLSTSSNNDDKINGKPVDVKNPSVPLVDGESDPNKTTCEACNITFSRHETYMVHKQYYCATRHDPPLKRSASNKVPAMQRTMRTRKRRKMYEMCLPEQEQRPPLVQQRFLDVANLNNPCTSTQEPTEGLGECYHPRCDIFPGIVSKHLETSLTINKCVPVSKCDTTHSSVSCLEMDVPIDLSKKCLSQSERTTTSPKRLLDYHECTVCKISFNKVENYLAHKQNFCPVTAHQRNDLGQLDGKVFPNPESERNSPDVSYERSIIKCEKNGNLKQPSPNGNLFSSHLATLQGLKVFSEAAQLIATKEENRHLFLPQCLYPGAIKKAKGADQLSPYYGIKPSDYISGSLVIHNTDIEQSRNAENESPKGQASSNGCAALKKDSLPLLPKNRGMVIVNGGLKQDERPAANPQQENISQNPQHEDDHKSPSWISENPLAANENVSPGIPSAEEQLSSIAKGVNGSSQAPTSGKYCRLCDIQFNNLSNFITHKKFYCSSHAAEHVK

SEQ ID NO: 15941 - protein, 805 aa, Homo sapiens
MDEDGLELQQEPNSFFDATGADGTHMDGDQIVVEVQETVFVSDVVDSDITVHNFVPDDPDSVVIQDVIEDVVIEDVQCPDIMEEADVSETVIIPEQVLDSDVTEEVSLAHCTVPDDVLASDITSASMSMPEHVLTGDSIHVSDVGHVGHVGHVEHVVHDSVVEAEIVTDPLTTDVVSEEVLVADCASEAVIDANGIPVDQQDDDKGNCEDYLMISLDDAGKIEHDGSSGMTMDTESEIDPCKVDGTCPEVIKVYIFKADPGEDDLGGTVDIVESEPENDHGVELLDQNSSIRVPREKMVYMTVNDSQPEDEDLNVAEIADEVYMEVIVGEEDAAAAAAAAAVHEQQMDDNEIKTFMPIAWAAAYGNNSDGIENRNGTASALLHIDESAGLGRLAKQKPKKRRRPDSRQYQTAIIIGPDGHPLTVYPCMICGKKFKSRGFLKRHMKNHPEHLAKKKYRCTDCDYTTNKKISLHNHLESHKLTSKAEKAIECDECGKHFSHAGALFTHKMVHKEKGANKMHKCKFCEYETAEQGLLNRHLLAVHSKNFPHICVECGKGFRHPSELKKHMRIHTGEKPYQCQYCEYRSADSSNLKTHVKTKHSKEMPFKCDICLLTFSDTKEVQQHALIHQESKTHQCLHCDHKSSNSSDLKRHIISVHTKDYPHKCDMCDKGFHRPSELKKHVAAHKGKKMHQCRHCDFKIADPFVLSRHILSVHTKDLPFRCKRCRKGFRQQSELKKHMKTHSGRKVYQCEYCEYSTTDASGFKRHVISIHTKDYPHRCEYCKKGFRRPSEKNQHIMRHHKEVGLP

SEQ ID NO: 15942 - protein, 801 aa, Homo sapiens
MDEDEFELQPQEPNSFFDGIGADATHMDGDQIVVEIQEAVFVSNIVDSDITVHNFVPDDPDSVVIQDVVEDVVIEEDVQCSDILEEADVSENVIIPEQVLDSDVTEEVSLPHCTVPDDVLASDITSTSMSMPEHVLTSESMHVCDIGHVEHMVHDSVVEAEIITDPLTSDIVSEEVLVADCAPEAVIDASGISVDQQDNDKASCEDYLMISLDDAGKIEHDGSTGVTIDAESEMDPCKVDSTCPEVIKVYIFKADPGEDDLGGTVDIVESEPENDHGVELLDQNSSIRVPREKMVYMTVNDSQQEDEDLNVAEIADEVYMEVIVGEEDAAVAAAAAAVHEQQIDEDEMKTFVPIAWAAAYGNNSDGIENRNGTASALLHIDESAGLGRLAKQKPKKKRRPDSRQYQTAIIIGPDGHPLTVYPCMICGKKFKSRGFLKRHMKNHPEHLAKKKYHCTDCDYTTNKKISLHNHLESHKLTSKAEKAIECDECGKHFSHAGALFTHKMVHKEKGANKMHKCKFCEYETAEQGLLNRHLLAVHSKNFPHICVECGKGFRHPSELRKHMRIHTGEKPYQCQYCEYRSADSSNLKTHIKTKHSKEMPFKCDICLLTFSDTKEVQQHTLVHQESKTHQCLHCDHKSSNSSDLKRHVISVHTKDYPHKCEMCEKGFHRPSELKKHVAVHKGKKMHQCRHCDFKIADPFVLSRHILSVHTKDLPFRCKRCRKGFRQQNELKKHMKTHSGRKVYQCEYCEYSTTDASGFKRHVISIHTKDYPHRCEYCKKGFRRPSEKNQHIMRHHKEVGLP

SEQ ID NO: 15943 - protein, 2539 aa, Homo sapiens [sequence omitted]

SEQ ID NO: 15944 - protein, 271 aa, Homo sapiens
MTEPQVGCVACPRVHKEPAQVGTPWPAKPRSHPRKRDPTALLPRSLWPACQESVTALCFLQETVERLGQSPAQDTPVLGPCWDPMALGTQGRLLLDRDSKDTQTRISQKGRRLQPPGTPSAPPQRRPRKQLNPCRGTERVDPGFEGVTLKFQIKPDSSLQIIPTYSLPCSSRSQESPADAVGGPAAHPGGTEAHSAGSEALEPRRCASCRTQRTPLWRDAEDGTPLCNACGIRYKKYGTRCSSCWLVPRKNVQPKRLCGRCGVSLDPIQEG

SEQ ID NO: 15945 - protein, 531 aa, Homo sapiens
MDEESLESALQTYRAQLQQVELALGAGLDSSEQADLRQLQGDLKELIELTEASLVSVRKSSLLAALDEERPGRQEDAEYQAFREAITEAVEAPAAARGSGSETVPKAEAGPESAAGGQEEEEGEDEEELSGTKVSAPYYSSWGTLEYHNAMVVGTEEAEDGSAGVRVLYLYPTHKSLKPCPFFLEGKCRFKENCRFSHGQVVSLDELRPFQDPDLSSLQAGSACLAKHQDGLWHAARITDVDNGYYTVKFDSLLLREAVVEGDGILPPLRTEATESDSDSDGTGDSSYARVVGSDAVDSAQSSALCPSLAVVGSDAVDSGTCSSAFAGWEVHTRGIGSRLLTKMGYEFGKGLGRHAEGRVEPIHAVVLPRGKSLDQCVETLQKQTRVGKAGTNKPPRCRGRGARPGGRPAPRNVFDFLNEKLQGQAPGALEAGAAPAGRRSKDMYHASKSAKRALSLRLFQTEEKIERTQRDIRSIQEALARNAGRHSVASAQLQEKLAGAQRQLGQLRAQEAGLQQEQRKADTHKKMTEF

SEQ ID NO: 15946 - protein, 873 aa, Homo sapiens
MASRRKSTTPCMVLASEQDPDLELISDLDEGPPVLTPVENTRAESISSDEEVHESVDSDNQQNKKVEGGYECKYCTFQTPDLNMFTFHVDSEHPNVVLNSSYVCVECNFLTKRYDALSEHNLKYHPGEENFKLTMVKRNNQTIFEQTINDLTFDGSFVKEENAEQAESTEVSSSGISISKTPIMKMMKNKVENKRIAVHHNSVEDVPEEKENEIKPDREEIVENPSSSASESNTSTSIVNRIHPSTASTVVTPAAVLPGLAQVITAVSAQQNSNLIPKVLIPVNSIPTYNAALDNNPLLLNTYNKFPYPTMSEITVLSAQAKYTEEQIKIWFSAQRLKHGVSWTPEEVEEARRKQFNGTVHTVPQTITVIPTHISTGSNGLPSILQTCQIVGQPGLVLTQVAGTNTLPVTAPIALTVAGVPSQNNIQKSQVPAAQPTAETKPATAAVPTSQSVKHETALVNPDSFGIRAKKTKEQLAELKVSYLKNQFPHDSEIIRLMKITGLTKGEIKKWFSDTRYNQRNSKSNQCLHLNNDSSTTIIIDSSDETTESPTVGTAQPKQSWNPFPDFTPQKFKEKTAEQLRVLQASFLNSSVLTDEELNRLRAQTKLTRREIDAWFTEKKKSKALKEEKMEIDESNAGSSKEEAGETSPADESGAPKSGSTGKICKKTPEQLHMLKSAFVRTQWPSPEEYDKLAKESGLARTDIVSWFGDTRYAWKNGNLKWYYYYQSANSSSMNGLSSLRKRGRGRPKGRGRGRPRGRPRGSKRINNWDRGPSLIKFKTGTAILKDYYLKHKFLNEQDLDELVNKSHMGYEQVREWFAERQRRSELGIELFEENEEEDEVIDDQEEDEEETDDSDTWEPPRHVKRKLSKSDD

SEQ ID NO: 15947 - protein, 837 aa, Homo sapiens
MASKRKSTTPCMVRTSQVVEQDVPEEVDRAKEKGIGTPQPDVAKDSWAAELENSSKENEVIEVKSMGESQSKKLQGGYECKYCPYSTQNLNEFTEHVDMQHPNVILNPLYVCAECNFTTKKYDSLSDHNSKFHPGEANFKLKLIKRNNQTVLEQSIETTNHVVSITTSGPGTGDSDSGISVSKTPIMKPGKPKADAKKVPKKPEEITPENHVEGTARLVTDTAEILSRLGGVELLQDTLGHVMPSVQLPPNINLVPKVPVPLNTTKYNSALDTNATMINSFNKFPYPTQAELSWLTAASKHPEEHIRIWFATQRLKHGISWSPEEVEEARKKMFNGTIQSVPPTITVLPAQLAPTKVTQPILQTALPCQILGQTSLVLTQVTSGSTTVSCSPITLAVAGVTNHGQKRPLVTPQAAPEPKRPHIAQVPEPPPKVANPPLTPASDRKKTKEQIAHLKASFLQSQFPDDAEVYRLIEVTGLARSEIKKWFSDHRYRCQRGIVHITSESLAKDQLAIAASRHGRTYHAYPDFAPQKFKEKTQGQVKILEDSFLKSSFPTQAELDRLRVETKLSRREIDSWFSERRKLRDSMEQAVLDSMGSGKKGQDVGAPNGALSRLDQLSGAQLTSSLPSPSPAIAKSQEQVHLLRSTFARTQWPTPQEYDQLAAKTGLVRTEIVRWFKENRCLLKTGTVKWMEQYQHQPMADDHGYDAVARKATKPMAESPKNGGDVVPQYYKDPKKLCEEDLEKLVTRVKVGSEPAKDCLPAKPSEATSDRSEGSSRDGQGSDENEESSVVDYVEVTVGEEDAISDRSDSWSQAAAEGVSELAESDSDCVPAEAGQA

SEQ ID NO: 15948 - protein, 956 aa, Homo sapiens
MASKRKSTTPCMIPVKTVVLQDASMEAQPAETLPEGPQQDLPPEASAASSEAAQNPSSTDGSTLANGHRSTLDGYLYSCKYCDFRSHDMTQFVGHMNSEHTDFNKDPTFVCSGCSFLAKTPEGLSLHNATCHSGEASFVWNVAKPDNHVVVEQSIPESTSTPDLAGEPSAEGADGQAEIIITKTPIMKIMKGKAEAKKIHTLKENVPSQPVGEALPKLSTGEMEVREGDHSFINGAVPVSQASASSAKNPHAANGPLIGTVPVLPAGIAQFLSLQQQPPVHAQHHVHQPLPTAKALPKVMIPLSSIPTYNAAMDSNSFLKNSFHKFPYPTKAELCYLTVVTKYPEEQLKIWFTAQRLKQGISWSPEEIEDARKKMFNTVIQSVPQPTITVLNTPLVASAGNVQHLIQAALPGHVVGQPEGTGGGLLVTQPLMANGLQATSSPLPLTVTSVPKQPGVAPINTVCSNTTSAVKVVNAAQSLLTACPSITSQAFLDASIYKNKKSHEQLSALKGSFCRNQFPGQSEVEHLTKVTGLSTREVRKWFSDRRYHCRNLKGSRAMIPGDHSSIIIDSVPEVSFSPSSKVPEVTCIPTTATLATHPSAKRQSWHQTPDFTPTKYKERAPEQLRALESSFAQNPLPLDEELDRLRSETKMTRREIDSWFSERRKKVNAEETKKAEENASQEEEEAAEDEGGEEDLASELRVSGENGSLEMPSSHILAERKVSPIKINLKNLRVTEANGRNEIPGLGACDPEDDESNKLAEQLPGKVSCKKTAQQRHLLRQLFVQTQWPSNQDYDSIMAQTGLPRPEVVRWFGDSRYALKNGQLKWYEDYKRGNFPPGLLVIAPGNRELLQDYYMTHKMLYEEDLQNLCDKTQMSSQQVKQWFAEKMGEETRAVADTGSEDQGPGTGELTAVHKGMGDTYSEVSENSESWEPRVPEASSEPFDTSSPQAGRQLETD

SEQ ID NO: 15949 - protein, 447 aa, Homo sapiens
MLLDAGPQYPAIGVTTFGASRHHSAGDVAERDVGLGINPFADGMGAFKLNPSSHELASAGQTAFTSQAPGYAAAAALGHHHHPGHVGSYSSAAFNSTRDFLFRNRGFGDAAAAASAQHSLFAASAGGFGGPHGHTDAAGHLLFPGLHEQAAGHASPNVVNGQMRLGFSGDMYPRPEQYGQVTSPRSEHYAAPQLHGYGPMNVNMAAHHGAGAFFRYMRQPIKQELICKWIEPEQLANPKKSCNKTFSTMHELVTHVTVEHVGGPEQSNHICFWEECPREGKPFKAKYKLVNHIRVHTGEKPFPCPFPGCGKVFARSENLKIHKRTHTGEKPFKCEFEGCDRRFANSSDRKKHMHVHTSDKPYLCKMCDKSYTHPSSLRKHMKVHESSSQGSQPSPAASSGYESSTPPTIVSPSTDNPTTSSLSPSSSAVHHTAGHSALSSNFNEWYV

SEQ ID NO: 15950 - protein, 532 aa, Homo sapiens
MLLDAGPQFPAIGVGSFARHHHHSAAAAAAAAAEMQDRELSLAAAQNGFVDSAAAHMGAFKLNPGAHELSPGQSSAFTSQGPGAYPGSAAAAAAAAALGPHAAHVGSYSGPPFNSTRDFLFRSRGFGDSAPGGGQHGLFGPGAGGLHHAHSDAQGHLLFPGLPEQHGPHGSQNVLNGQMRLGLPGEVFGRSEQYRQVASPRTDPYSAAQLHNQYGPMNMNMGMNMAAAAAHHHHHHHHHPGAFFRYMRQQCIKQELICKWIDPEQLSNPKKSCNKTFSTMHELVTHVSVEHVGGPEQSNHVCFWEECPREGKPFKAKYKLVNHIRVHTGEKPFPCPFPGCGKVFARSENLKIHKRTHTGEKPFQCEFEGCDRRFANSSDRKKHMHVHTSDKPYLCKMCDKSYTHPSSLRKHMKVHESSPQGSESSPAASSGYESSTPPGLVSPSAEPQSSSNLSPAAAAAAAAAAAAAAAVSAVHRGGGSGSGGAGGGSGGGSGSGGGGGGAGGGGGGSSGGGSGTAGGHSGLSSNFNEWYV

SEQ ID NO: 15951 - protein, 467 aa, Homo sapiens
MTMLLDGGPQFPGLGVGSFGAPRHHEMPNREPAGMGLNPFGDSTHAAAAAAAAAAFKLSPAAAHDLSSGQSSAFTPQGSGYANALGHHHHHHHHHHHTSQVPSYGGAASAAFNSTREFLFRQRSSGLSEAASGGGQHGLFAGSASSLHAPAGIPEPPSYLLFPGLHEQGAGHPSPTGHVDNNQVHLGLRGELFGRADPYRPVASPRTDPYAAGAQFPNYSPMNMNMGVNVAAHHGPGAFFRYMRQPIKQELSCKWIDEAQLSRPKKSCDRTFSTMHELVTHVTMEHVGGPEQNNHVCYWEECPREGKSFKAKYKLVNHIRVHTGEKPFPCPFPGCGKIFARSENLKIHKRTHTGEKPFKCEFEGCDRRFANSSDRKKHMHVHTSDKPYICKVCDKSYTHPSSLRKHMKVHESQGSDSSPAASSGYESSTPPAIASANSKDTTKTPSAVQTSTSHNPGLPPNFNEWYV

SEQ ID NO: 15952 - protein, 334 aa, Homo sapiens; identical to SEQ ID NO: 14389

SEQ ID NO: 15953 - protein, 663 aa, Homo sapiens
MFLKAGRGNKVPPVRVYGPDCVVLMEPPLSKRNPPALRLADLATAQVQPLQNMTGFPALAGPPAHSQLRAAVAHLRLRDLGADPGVATTPLGPEHMAQASTLGLSPPSQAFPAHPEAPAAAARAAALVAHPGAGSYPCGGGSSGAQPSAPPPPAPPLPPTPSPPPPPPPPPPPALSGYTTTNSGGGGSSGKGHSRDFVLRRDLSATAPAAAMHGAPLGGEQRSGTGSPQHPAPPPHSAGMFISASGTYAGPDGSGGPALFPALHDTPGAPGGHPHPLNGQMRLGLAAAAAAAAAELYGRAEPPFAPRSGDAHYGAVAAAAAAALHGYGAVNLNLNLAAAAAAAAAGPGPHLQHHAPPPAPPPPPAPAQHPHQHHPHLPGAAGAFLRYMRQPIKQELICKWIDPDELAGLPPPPPPPPPPPPPPPAGGAKPCSKTFGTMHELVNHVTVEHVGGPEQSSHVCFWEDCPREGKPFKAKYKLINHIRVHTGEKPFPCPFPGCGKVFARSENLKIHKRTHTGEKPFKCEFDGCDRKFANSSDRKKHSHVHTSDKPYYCKIRGCDKSYTHPSSLRKHMKIHCKSPPPSPGPLGYSSVGTPVGAPLSPVLDPARSHSSTLSPQVTNLNEWYVCQASGAPSHLHTPSSNGTTSETEDEEIYGNPEVVRTIH

SEQ ID NO: 15954 - protein, 487 aa, Homo sapiens
MAAAALRAPTQVTVSPETHMDLTKGCVTFEDIAIYFSQDEWGLLDEAQRLLYLEVMLENFALVASLGCGHGTEDEETPSDQNVSVGVSQSKAGSSTQKTQSCEMCVPVLKDILHLADLPGQKPYLVGECTNHHQHQKHHSAKKSLKRDMDRASYVKCCLFCMSLKPFRKWEVGKDLPAMLRLLRSLVFPGGKKPGTITECGEDIRSQKSHYKSGECGKASRHKHTPVYHPRVYTGKKLYECSKCGKAFRGKYSLVQHQRVHTGERPWECNECGKFFSQTSHLNDHRRIHTGERPYECSECGKLFRQNSSLVDHQKIHTGARPYECSQCGKSFSQKATLVKHQRVHTGERPYKCGECGNSFSQSAILNQHRRIHTGAKPYECGQCGKSFSQKATLIKHQRVHTGERPYKCGDCGKSFSQSSILIQHRRIHTGARPYECGQCGKSFSQKSGLIQHQVVHTGERPYECNKCGNSFSQCSSLIHHQKCHNT

SEQ ID NO: 15955 - protein, 527 aa, Homo sapiens
MYQPEDDNNSDVTSDDDMTRNRRESSPPHSVHSFSGDRDWDRRGRSRDMEPRDRWSHTRNPRSRMPPRDLSLPVVAKTSFEMDREDDRDSRAYESRSQDAESYQNVVDLAEDRKPHNTIQDNMENYRKLLSLGFLAQDSVPAEKRNTEMLDNLPSAGSQFPDFKHLGTFLVFEELVTFEDVLVDFSPEELSSLSAAQRNLYREVMLENYRNLVSLGHQFSKPDIISRLEEEESYAMETDSRHTVICQGESHDDPLEPHQGNQEKLLTPITMNDPKTLTPERSYGSDEFERSSNLSKQSKDPLGKDPQEGTAPGICTSPQSASQENKHNRCEFCKRTFSTQVALRRHERIHTGKKPYECKQCAEAFYLMPHLNRHQKTHSGRKTSGCNEGRKPSVQCANLCERVRIHSQEDYFECFQCGKAFLQNVHLLQHLKAHEAARVLPPGLSHSKTYLIRYQRKHDYVGERACQCCDCGRVFSRNSYLIQHYRTHTQERPYQCQLCGKCFGRPSYLTQHYQLHSQEKTVECDHC

SEQ ID NO: 15956 - protein, 472 aa, Homo sapiens
MNNSQGRVTFEDVTVNFTQGEWQRLNPEQRNLYRDVMLENYSNLVSVGQGETTKPDVILRLEQGKEPWLEEEEVLGSGRAEKNGDIGGQIWKPKDVKESLAREVPSINKETLTTQKGVECDGSKKILPLGIDDVSSLQHYVQNNSHDDNGYRKLVGNNPSKFVGQQLKCNACRKLFSSKSRLQSHLRRHACQKPFECHSCGRAFGEKWKLDKHQKTHAEERPYKCENCGNAYKQKSNLFQHQKMHTKEKPYQCKTCGKAFSWKSSCINHEKIHNAKKSYQCNECEKSFRQNSTLIQHKKVHTGQKPFQCTDCGKAFIYKSDLVKHQRIHTGEKPYKCSICEKAFSQKSNVIDHEKIHTGKRAYECDLCGNTFIQKKNLIQHKKIHTGEKPYECNRCGKAFFQKSNLHSHQKTHSGERTYRCSECGKTFIRKLNLSLHKKTHTGQKPYGCSECGKAFADRSYLVRHQKRIHSR

SEQ ID NO: 15957 - protein, 563 aa, Homo sapiens
MMTAESREATGLSPQAAQEKDGIVIVKVEEEDEEDHMWGQDSTLQDTPPPDPEIFRQRFRRFCYQNTFGPREALSRLKELCHQWLRPEINTKEQILELLVLEQFLSILPKELQVWLQEYRPDSGEEAVTLLEDLELDLSGQQVPGQVHGPEMLARGMVPLDPVQESSSFDLHHEATQSHFKHSSRKPRLLQSRALPAAHIPAPPHEGSPRDQAMASALFTADSQAMVKIEDMAVSLILEEWGCQNLARRNLSRDNRQENYGSAFPQGGENRNENEESTSKAETSEDSASRGETTGRSQKEFGEKRDQEGKTGERQQKNPEEKTRKEKRDSGPAIGKDKKTITGERGPREKGKGLGRSFSLSSNFTTPEEVPTGTKSHRCDECGKCFTRSSSLIRHKIIHTGEKPYECSECGKAFSLNSNLVLHQRIHTGEKPHECNECGKAFSHSSNLILHQRIHSGEKPYECNECGKAFSQSSDLTKHQRIHTGEKPYECSECGKAFNRNSYLILHRRIHTREKPYKCTKCGKAFTRSSTLTLHHRIHARERASEYSPASLDAFGAFLKSCV

SEQ ID NO: 15958 - protein, 967 aa, Homo sapiens
MAVALDSQIDAPLEVEGCLIMKVEKDPEWASEPILEGSDSSETFRKCFRQFCYEDVTGPHEAFSKLWELCCRWLKPEMRSKEQILELLVIEQFLTILPEKIQAWAQKQCPQSGEEAVALVVHLEKETGRLRQQVSSPVHREKHSPLGAAWEVADFQPEQVETQPRAVSREEPGSLHSGHQEQLNRKRERRPLPKNARPSPWVPALADEWNTLDQEVTTTRLPAGSQEPVKDVHVARGFSYRKSVHQIPAQRDLYRDFRKENVGNVVSLGSAVSTSNKITRLEQRKEPWTLGLHSSNKRSILRSNYVKEKSVHAIQVPARSAGKTWREQQQWGLEDEKIAGVHWSYEETKTFLAILKESRFYETLQACPRNSQVYGAVAEWLRECGFLRTPEQCRTKFKSLQKSYRKVRNGHMLEPCAFFEDMDALLNPAARAPSTDKPKEMIPVPRLKRIAISAKEHISLVEEEEAAEDSDDDEIGIEFIRKSEIHGAPVLFQNLSGVHWGYEETKTFLDILRETRFYEALQACHRKSKLYGAVAEQLRECGFLRTPEQCRTKFKSLQKSYRKVKNGHVLESCAFYKEMDALINSRASAPSPSTPEEVPSPSRQERGGIEVEPQEPTGWEPEETSQEAVIEDSCSERMSEEEIVQEPEFQGPPGLLQSPNDFEIGSSIKEDPTQIVYKDMEQHRALIEKSKRVVSQSTDPSKYRKRECISGRQWENLQGIRQGKPMSQPRDLGKAVVHQRPFVGKRPYRLLKYGESFGRSTRLMCRMTHHKENPYKCGVCGKCFGRSRSLIRHQRIHTGEKPFKCLDCGKSFNDSSNFGAHQRIHTGEKPYRCGECGKCFSQSSSLIIHQRTHTGEKPYQCGECGKSFTNSSHFSAHRRVHTGENPYKCVDCEKSFNNCTRFREHRRIHTGEKPYGCAQCGKRFSKSSVLTKHREVHVREKPLPHPPSLYCPENPHKGKTDEFRKTF

SEQ ID NO: 15959 - protein, 538 aa, Homo sapiens
MARELSESTALDAQSTEDQMELLVIKVEEEEAGFPSSPDLGSEGSRERFRGFRYPEAAGPREALSRLRELCRQWLQPEMHSKEQILELLVLEQFLTILPGNLQSWVREQHPESGEEVVVLLEYLERQLDEPAPQVSGVDQGQELLCCKMALLTPAPGSQSSQFQLMKALLKHESVGSQPLQDRVLQVPVLAHGGCCREDKVVASRLTPESQGLLKVEDVALTLTPEWTQQDSSQGNLCRDEKQENHGSLVSLGDEKQTKSRDLPPAEELPEKEHGKISCHLREDIAQIPTCAEAGEQEGRLQRKQKNATGGRRHICHECGKSFAQSSGLSKHRRIHTGEKPYECEECGKAFIGSSALVIHQRVHTGEKPYECEECGKAFSHSSDLIKHQRTHTGEKPYECDDCGKTFSQSCSLLEHHRIHTGEKPYQCSMCGKAFRRSSHLLRHQRIHTGDKNVQEPEQGEAWKSRMESQLENVETPMSYKCNECERSFTQNTGLIEHQKIHTGEKPYQCNACGKGFTRISYLVQHQRSHVGKNILSQ

SEQ ID NO: 15960 - protein, 545 aa, Homo sapiens
MAREPRKNAALDAQSAEDQTGLLTVKVEKEEASALTAEVRAPCSPARGPERSRQRFRGFRYPEAAGPREALSRLRELCGQWLQPEMHSKEQILELLVLEQFLTILPGNLQSWVREQHPESGEEVVVLLEYLERQLDEPAPQVPVGDQGQELLCCKMALLTQTQGSQSSQCQPMKALFKHESLGSQPLHDRVLQVPGLAQGGCCREDAMVASRLTPGSQGLLKMEDVALTLTPGWTQLDSSQVNLYRDEKQENHSSLVSLGGEIQTKSRDLPPVKKLPEKEHGKICHLREDIAQIPTHAEAGEQEGRLQRKQKNAIGSRRHYCHECGKSFAQSSGLTKHRRIHTGEKPYECEDCGKTFIGSSALVIHQRVHTGEKPYECEECGKVFSHSSNLIKHQRTHTGEKPYECDDCGKTFSQSCSLLEHHKIHTGEKPYQCNMCGKAFRRNSHLLRHQRIHGDKNVQNPEHGESWESQGRTESQWENTEAPVSYKCNECERSFTRNRSLIEHQKIHTGEKPYQCDTCGKGFTRTSYLVQHQRSHVGKKTLSQ

SEQ ID NO: 15961 - protein, 839 aa, Homo sapiens
MIMTESREVIDLDPPAETSQEQEDLFIVKVEEEDCTWMQEYNPPTFETFYQRFRHFQYHEASGPREALSQLRVLCCEWLRPELHTKEQILELLVLEQFLTILPEEFQPWVREHHPESGEEAVAVIENIQRELEERRQQIVACPDVLPRKMATPGAVQESCSPHPLTVDTQPEQAPQKPRLLEENALPVLQVPSLPLKDSQELTASLLSTGSQKLVKIEEVADVAVSFILEEWGHLDQSQKSLYRDDRKENYGSITSMGYESRDNMELIVKQISDDSESHWVAPEHTERSVPQDPDFAEVSDLKGMVQRWQVNPTVGKSRQNPSQKRDLDAITDISPKQSTHGERGHRCSDCGKFFLQASNFIQHRRIHTGEKPFKCGECGKSYNQRVHLTQHQRVHTGEKPYKCQVCGKAFRVSSHLVQHHSVHSGERPYGCNECGKNFGRHSHLIEHLKRHFREKSQRCSDKRSKNTKLSVKKKISEYSEADMELSGKTQRNVSQVQDFGEGCEFQGKLDRKQGIPMKEILGQPSSKRMNYSEVPYVHKKSSTGERPHKCNECGKSFIQSAHLIQHQRIHTGEKPFRCEECGKSYNQRVHLTQHQRVHTGEKPYTCPLCGKAFRVRSHLVQHQSVHSGERPFKCNECGKGFGRRSHLAGHLRLHSREKSHQCRECGEIFFQYVSLIEHQVLHMGQKNEKNGICEEAYSWNLTVIEDKKIELQEQPYQCDICGKAFGYSSDLIQHYRTHTAEKPYQCDICRENVGQCSHTKQHQKIYSSTKSHQCHECGRGFTLKSHLNQHQRIHTGEKPFQCKECGMNFSWSCSLFKHLRSHERTDPINTLSVEGSLL

SEQ ID NO: 15962 - protein, 754 aa, Homo sapiens
MTTAGRGNLGLIPRSTAFQKQEGRLTVKQEPANQTWGQGSSLQKNYPPVCEIFRLHFRQLCYHEMSGPQEALSRLRELCRWWLMPEVHTKEQILELLVLEQFLSILPGELRTWVQLHHPESGEEAVAVVEDFQRHLSGSEEVSAPAQKQEMHFEETTALGTTKESPPTSPLSGGSAPGAHLEPPYDPGTHHLPSGDFAQCTSPVPTLPQVGNSGDQAGATVLRMVRPQDTVAYEDLSVDYTQKKWKSLTLSQRALQWNMMPENHHSMASLAGENMMKGSELTPKQEFFKGSESSNRTSGGLFGVVPGAAETGDVCEDTFKELEGQTSDEEGSRLENDFLEITDEDKKKSTKDRYDKYKEVGEHPPLSSSPVEHEGVLKGQKSYRCDECGKAFNRSSHLIGHQRIHTGEKPYECNECGKTFRQTSQLIVHLRTHTGEKPYECSECGKAYRHSSHLIQHQRLHNGEKPYKCNECAKAFTQSSRLTDHQRTHTGEKPYECNECGEAFIRSKSLARHQVLHTGKKPYKCNECGRAFCSNRNLIDHQRIHTGEKPYECSECGKAFSRSKCLIRHQSLHTGEKPYKCSECGKAFNQNSQLIEHERIHTGEKPFECSECGKAFGLSKCLIRHQRLHTGEKPYKCNECGKSFNQNSHLIIHQRIHTGEKPYECNECGKVFSYSSSLMVHQRTHTGEKPYKCNDCGKAFSDSSQLIVHQRVHTGEKPYECSECGKAFSQRSTFNHHQRTHTGEKSSGLAWSVS

SEQ ID NO: 15963 - protein, 578 aa, Homo sapiens
MAEESRKPSAPSPPDQTPEEDLVIVKVEEDHGWDQESSLHESNPLGQEVFRLRFRQLRYQETLGPREALIQLRALCHQWLRPDLNTKEQILELLVLEQFLTILPEELQTLVKEHQLENGEEVVTLLEDLERQIDILGRPVSARVHGHRVLWEEVVHSASAPEPPNTQLQSEATQHKSPVPQESQERAMSTSQSPTRSQKGSSGDQEMTATLLTAGFQTLEKIEDMAVSLIREEWLLDPSQKDLCRDNRPENFRNMFSLGGETRSENRELASKQVISTGIQPHGETAAKCNGDVIRGLEHEEARDLLGRLERQRGNPTQERRHKCDECGKSFAQSSGLVRHWRIHTGEKPYQCNVCGKAFSYRSALLSHQDIHNKVKRYHCKECGKAFSQNTGLILHQRIHTGEKPYQCNQCGKAFSQSAGLILHQRIHSGERPYECNECGKAFSHSSHLIGHQRIHTGEKPYECDECGKTFRRSSHLIGHQRSHTGEKPYKCNECGRAFSQKSGLIEHQRIHTGERPYKCKECGKAFNGNTGLIQHLRIHTGEKPYQCNECGKAFIQRSSLIRHQRIHSGEKSESISV

SEQ ID NO: 15964 - protein, 638 aa, Homo sapiens
MESCSVTRLECSGAISAHCSLHLPGSSDSPASASQIAGTTDAIWNEQEKAELFTDKFCQVCGVMLQFESQRISHYEGEKHAQNVSFYFQMHGEQNEVPGKKMKMHVENFQVHRYEGVDKNKFCDLCNMMFSSPLIAQSHYVGKVHAKKLKQLMEEHDQASPSGFQPEMAFSMRTYVCHICSIAFTSLDMFRSHMQGSEHQIKESIVINLVKNSRKTQDSYQNECADYINVQKARGLEAKTCFRKMEESSLETRRYREVVDSRPRHRMFEQRLPFETFRTYAAPYNISQAMEKQLPHSKKTYDSFQDELEDYIKVQKARGLDPKTCFRKMRENSVDTHGYREMVDSGPRSRMCEQRFSHEASQTYQRPYHISPVESQLPQWLPTHSKRTYDSFQDELEDYIKVQKARGLEPKTCFRKIGDSSVETHRNREMVDVRPRHRMLEQKLPCETFQTYSGPYSISQVVENQLPHCLPAHDSKQRLDSISYCQLTRDCFPEKPVPLSLNQQENNSGSYSVESEVYKHLSSENNTADHQAGHKQKHQKRKRHLEEGKERPEKEQSKHKRKKSYEDTDLDKDKSIRQRKREEDRVKVSSGKLKHRKKKKSHDVPSEKEERKHRKEKKKSVEERTEEEMLWDESILGF

SEQ ID NO: 15965 - protein, 199 aa, Homo sapiens
MASGSGTKNLDFRRKWDKDEYEKLAEKRLTEEREKKDGKPVQPVKRELLRHRDYKVDLESKLGKTIVITKTTPQSEMGGYYCNVCDCVVKDSINFLDHINGKKHQRNLGMSMRVERSTLDQVKKRFEVNKKKMEEKQKDYDFEERMKELREEEEKAKAYKKEKQKEKKRRAEEDLTFEEDDEMAAVMGFSGFGSTKKSY

SEQ ID NO: 15966 - protein, 289 aa, Homo sapiens
MILLQHAVLPPPKQPSPSPPMSVATRSTGTLQLPPQKPFGQEASLPLAGEEELSKGGEQDCALEELCKPLYCKLCNVTLNSAQQAQAHYQGKNHGKKLRNYYAANSCPPPARMSNVVEPAATPVVPVPPQMGSFKPGGRVILATENDYCKLCDASFSSPAVAQAHYQGKNHAKRLRLAEAQSNSFSESSELGQRRARKEGNEFKMMPNRRNMYTVQNNSAGPYFNPRSRQRIPRDLAMCVTPSGQFYCSMCNVGAGEEMEFRQHLESKQHKSKVSEQRYRNEMENLGYV

SEQ ID NO: 15967 - protein, 229 aa, Homo sapiens
MKSSDIDQDLFTDSYCKVCSAQLISESQRVAHYESRKHASKVRLYYMLHPRDGGCPAKRLRSENGSDADMVDKNKCCTLCNMSFTSAVVADSHYQGKIHAKRLKLLLGEKTPLKTTATPLSPLKPPRMDTAPVVASPYQRRDSDRYCGLCAAWFNNPLMAQQHYDGKKHKKNAARVALLEQLGTTLDMGELRGLRRNYRCTICSVSLNSIEQYHAHLKGSKHQTNLKNK

SEQ ID NO: 15968 - protein, 170 aa, Homo sapiens
MGKRYFCDYCDRSFQDNLHNRKKHLNGLQHLKAKKVWYDMFRDAAAILLDEQNKRPCRKFLLTGQCDFGSNCRFSHMSERDLQELSIQVEEERRAREWLLDAPELPEGHLEDWLEKRAKRLSSAPSSRAEPIRTTVFQYPVGWPPVQELPPSLRAPPPGGWPLQPRVQWG

SEQ ID NO: 15969 - protein, 573 aa, Homo sapiens
MDAKSLTAWSRTLVTFKDVFVDFTREEWKLLDTAQQIVYRNVMLENYKNLVSLGYQLTKPDVILRLEKGEEPWLVEREIHQETHPDSETAFEIKSSVSSRSIFKDKQSCDIKMEGMARNDLWYLSLEEVWKCRDQLDKYQENPERHLRQVAFTQKKVLTQERVSESGKYGGNCLLPAQLVLREYFHKRDSHTKSLKHDLVLNGHQDSCASNSNECGQTFCQNIHLIQFARTHTGDKSYKCPDNDNSLTHGSSLGISKGIHREKPYECKECGKFFSWRSNLTRHQLIHTGEKPYECKECGKSFSRSSHLIGHQKTHTGEEPYECKECGKSFSWFSHLVTHQRTHTGDKLYTCNQCGKSFVHSSRLIRHQRTHTGEKPYECPECGKSFRQSTHLILHQRTHVRVRPYECNECGKSYSQRSHLVVHHRIHTGLKPFECKDCGKCFSRSSHLYSHQRTHTGEKPYECHDCGKSFSQSSALIVHQRIHTGEKPYECCQCGKAFIRKNDLIKHQRIHVGEETYKCNQCGIIFSQNSPFIVHQIAHTGEQFLTCNQCGTALVNTSNLIGYQTNHIRENAY

SEQ ID NO: 15970 - protein, 542 aa, Homo sapiens
MDDPRYGMCPLKGASGCPGAERSLLVQSYFEKGPLTFRDVAIEFSLEEWQCLDSAQQGLYRKVMLENYRNLVFLAGIALTKPDLITCLEQGKEPWNIKRHEMVAKPPVICSHFPQDLWAEQDIKDSFQEAILKKYGKYGHDNLQLQKGCKSVDECKVHKEHDNKLNQCLITTQSNIFQCDPSAKVFHTFSNSNRHKIRHTRKKPFKCKKCEKSFCMLLHLTQHKRFHITENSYQCKDCGKAFNWFSTLTTHRRIHTGEKPYKCEECGKAFNRSSHLTTHKIIHTGEKPYRCEECGKAFNRSSHLTTHKRIHTGVKPYKCTECGKAFNRSSHLTTHRIIHTGEKPYKCEECGKAFNQSSTLTTHKITHAGEKPYKCEECGKAFYRFSYLTKHKTSHTGEKFYKCEECGKGFNWSSALTKHKRIHTGEKPYKCEECGKAFNESSNLTTHKMIHTGEKPYKCDECGKAFNRSSQLTAHKMIHTGEKPYKCEECGKAFNRSSTLTKHKITHTGEKSYKWEECGKDFNQSLSLIKQNNSYWRETLQM

SEQ ID NO: 15971 - protein, 436 aa, Homo sapiens
MDSVAFEDVAVNFTQEEWALLSPSQKNLYRDVTLETFRNLASVGIQWKDQDIENLYQNLGIKLRSLVERLCGRKEGNEHRETFSQIPDCHLNKKSQTGVKPCKCSVCGKVFLRHSFLDRHMRAHAGHKRSECGGEWRETPRKQKQHGKASISPSSGARRTVTPTRKRPYECKVCGKAFNSPNLFQIHQRTHTGKRSYKCREIVRAFTVSSFFRKHGKMHTGEKRYECKYCGKPIDYPSLFQIHVRTHTGEKPYKCKQCGKAFISAGYLRTHEIRSHALEKSHQCQECGKKLSCSSSLHRHERTHSGGKLYECQKCAKVFRCPTSLQAHERAHTGERPYECNKCGKTFNYPSCFRRHKKTHSGEKPYECTRCGKAFGWCSSLRRHEMTHTGEKPFDCKQCGKVFTFSNYLRLHERTHLAGRSQCFGRRQGDHLSPGV

SEQ ID NO: 15972 - protein, 1883 aa, Homo sapiens
MPVGRIECPSSPSFPRDISHECRVCGVTEVGLSAYAKHISGQLHKDNVDAQEREDDGKGEEEEEDYFDKELIQLIKQRKEQSRQDEPSNSNQEINSDDRRPQWRREDRIPYQDRESYSQPAWHHRGPPQRDWKWEKDGFNNTRKNSFPHSLRNGGGPRGRSGWHKGVAGGSSTWFHNHSNSGGGWLSNSGAVDWNHNGTGRNSSWLSEGTGGFSSWHMNNSNGNWKSSVRSTNNWNYSGPGDKFQPGRNRNSNCQMEDMTMLWNKKSNKSNKYSHDRYNWQRQENDKLGTVATYRGPSEGFTSDKFPSEGLLDFNFEQLESQTTKQADTATSKVSGKNGSAAREKPRRWTPYPSQKTLDLQSGLKDITGNKSEMIEKPLFDFSLITTGIQEPQTDETRNSPTQKTQKEIHTGSLNHKASSDSAASFEVVRQCPTAEKPEQEHTPNKMPSLKSPLLPCPATKSLSQKQDPKNISKNTKTNFFSPGEHSNPSNKPTVEDNHGPYISKLRSSCPHVLKGNKSTFGSQKQSGDNLNDTLRKAKEVLQCHESLQNPLLSTSKSTRNYAKASRNVEESEKGSLKIEFQVHALEDESDGETSDTEKHGTKIGTLGSATTELLSGSTRTADEKEEDDRILKTSRELSTSPCNPIVRQKESELQMTSAASPHPGLLLDLKTSLEDAQVDDSIKSHVSYETEGFESASLDAELQKSDISQPSGPLLPELSKLGFPASLQRDLTRHISLKSKTGVHLPEPNLNSARRIRNISGHRKSETEKESGLKPTLRQILNASRRNVNWEQVIQQVTKKKQELGKGLPRFGIEMVPLVQNEQEALDLDGEPDLSSLEGFQWEGVSISSSPGLARKRSLSESSVIMDRAPSVYSFFSEEGTGKENEPQQMVSPSNSLRAGQSQKATMHLKQEVTPRAASLRTGERAENVATQRRHSAQLSSDHIIPLMHLAKDLNSQERSIPPSENQNSQESNGEGNCLSSSASSALAISSLADAATDSSCTSGAEQNDGQSIRKKRRATGDGSSPELPSLERKNKRRKIKGKKERSQVDQLLNISLREEELSKSLQCMDNNLLQARAALQTAYVEVQRLLMLKQQITMEMSALRTHRIQILQGLQETYEPSEHPDQVPCSLTRERRNSRSQTSIDAALLPTPFFPLFLEPPSSHVSPSPTGASLQITTSPTFQTHGSVPAPDSSVQIKQEPMSPEQDENVNAVPPSSACNVSKELLEANREISDSCPVYPVITARLSLPESTESFHEPSQELKFSVEQRNTRNRENSPSSQSAGLSSINKEGEEPTKGNSGSEACTSSFLRLSFASETPLEKEPHSPADQPEQQAESTLTSAETRGSKKKKKLRKKKSLRAAHVPENSDTEQDVLTVKPVRKVKAGKLIKGGKVTTSTWEDSRTGREQESVRDEPDSDSSLEVLEIPNPQLEVVAIDSSESGEEKPDSPSKKDIWNSTEQNPLETSRSGCDEVSSTSEIGTRYKDGIPVSVAETQTVISSIKGSKNSSEISSEPGDDDEPTEGSFEGHQAAVNAIQIFGNLLYTCSADKTVRVYNLVSRKCIGVFEGHTSKVNCLLVTQTSGKNAALYTGSSDHTIRCYNVKSRECVEQLQLEDRVLCLHSRWRILYAGLANGTVVTFNIKNNKRLEIFECHGPRAVSCLATAQEGARKLLVVGSYDCTISVRDARNGLLLRTLEGHSKTILCMKVVNDLVFSGSSDQSVHAHNIHTGELVRIYKGHNHAVTVVNILGKVMVTACLDKFVRVYELQSHDRLQVYGGHKDMIMCMTIHKSMIYTGCYDGSIQAVRLNLMQNYRCWWHGCSLIFGVVDHLKQHLLTDHTNPNFQTLKCRWKNCDAFFTARKGSKQDAAGHIERHAEDDSKIDS

SEQ ID NO: 15973 - protein, 783 aa, Homo sapiens
MVAKPPVMSFHFAQDLWPEQNIKDSFQKVTLRRYGKCEYENLQLRKGCKHVDECTGHKGGHNTVNQCLTATPSKIFQCNKYVKVFDKFSNSNRYKRRHTGNKHFKCKECSKSFCVLSQLTQHRRIHTRVNSYKCEECGKAFNWFSTLTKHKRIHTGEKPYKCEECGKAFNQSSQLTRHKIIHTEEKPNKCEECGKAFKQASHLTIHKIIHTGEKPYKYEECGKVFSQSSHLTTQKILHTGENLYKCKECGKAFNLFSNLTNHKRIHAGEKPYKCKECGRAFNISSNLNKQEKIHTGGKLNKCEECDKAFNRSLKLTAHKKILMEEKPYKCEECGKVFNQFSTLTRHKIIHTGEKPYKCKECGKAFNQSSNLTEHKKIHTAEKSYKCEECGKAFNQHSNLINHRKIYSGEKPYKCEECGKAFNRSSTLTRHKKIHTGEKPYKCEECDRAFSQSSNLTEHKKIHTGEKPYKCEECGKAFNRFSTLTKHKRIHTGEKPYKCEECGKAFNQSYQLTRHKIVHTKEKLNKCEEFGKAFKQSSHRTIHKIIHTGEKPYKCEEHGKVFNQSSNLTTQKIIHTGENLYKFEEHGKAFNLFSNITNHKIIYTGEKPHKCEECGKAYNRFSNLTIHKRIHTGEKPYQCAECGKAFNCSSTLNRHKIIHTGEKPYKCKECGKAFNLSSTLTAHKKIHTGEKPYKCEECGKAFNQSSNLTTHKKIHTSEKPYKCEECGKSFNQFSSLNIHKIIHTGEKPYKCGDYGRAFNLSSNLTTHKKIHTGEKPYKCEYGKT

SEQ ID NO: 15974 - protein, 913 aa, Homo sapiens
MTKFQEMVTFKDVAVVFTEEELGLLDSVQRKLYRDVMLENFRNLLLVAHQPFKPDLISQLEREEKLLMVETETPRDGCSGRKNQQKMESIQEVTVSYFSPKELSSRQTWQQSAGGLIRCQDFLKVFQGKNSQLQEQGNSLGQVWAGIPVQISEDKNYIFTHIGNGSNYIKSQGYPSWRAHHSWRKMYLKESHNYQCRCQQISMKNHFCKCDSVSWLSHHNDKLEVHRKENYSCHDCGEDIMKVSLLNQESIQTEEKPYPCTGYRKAFSNDSSSEVHQQFHLEGKPYTYSSCGKGCNYSSLLHIHQNIEREDDIENSHLKSYQRVHTEEKPCKCGEYGENFNHCSPLNTYELIHTGEMSYRHNIYEKAFSHSLDLNSIFRVHTRDEPHEYEENENVFNQSSCLQVHQKIHTEEKLYTDIEYGKSFICSSNLDIQHRVHMEENSYNSEECGNGFSLASHFQDLQIVHTKEQPYKRYVCSNSFSHNLYLQGHPKIHIGEKPRKEHGNGFNWSSKLKDHQRVHTGQKPYKCNICGKGFNHRSVLNVHQRVHTGEKPYKCEECDKGFSRSSYLQAHQRVHTGEKPYKCEECGKGFSRNSYLQGHQRVHTGEKPYKCEECGKGFSRSSHLQGHQRVHTGEKPFKCEECGKGFSWSFNLQIHQRVHTGEKPYKCEECGKGFSKASTLLAHQRVHTGEKPYQCDECGKSFSQRSYLQSHQSVHSGERPYICEVCGKGFSQRAYLQGHQRVHTRVKPYKCEMCGKGFSQSSRLEAHRRVHTGGKPYKCEVCTKGFSESSRLQAHQRVHVEGRPYKCEQCGKGFSGYSSLQAHHRVHTGEKPYKCEVCGKGFSQRSNLQAHQRVHTGEKPYKCDACGKGFRWSSGLLIHQRVHSSDKFYKSEDYGKDYPSSENLHRNEDSVLF

SEQ ID NO: 15975 - protein, 417 aa, Homo sapiens
MSQDSVTFADVAVNFTKEEWTLLDPAQRNLYRDVMLENSRNLAFIDWATPCKTKDATPQPDILPKRTFPEANRVCLTSISSQHSTLREDWRCPKTEEPHRQGVNNVKPPAVAPEKDESPVSICEDHEMRNHSKPTCRLVPSQGDSIRQCILTRDSSIFKYNPVLNDSQKTHENNEDDGVLGWNIQWVPCGRKTELKSSTWTGSQNTVHHIRDEIDTGANRHQRNPFGKAFREDGSLRAHNTHGREKMYDFTQCENTSRNNSIHAMQMQLYTAETNKKDCQTGATSANAPNSGSHKSHCTGEKTHKCPECGRAFFYQSFLMRHMKIHTGEKPYECGKCGKAFRYSLHLNKHLRKHVVQKKPYECEECGKVIRESSKYTHIRSHTGEKPYKCKTCGKDFAKSSGLKKHLKTHKDEKPCE

SEQ ID NO: 15976 - protein, 483 aa, Homo sapiens
MKRHEMVAKHLVMFYYFAQHLWPEQNIRDSFQKVTLRRYRKCGYENLQLRKGCKSVVECKQHKGDYSGLNQCLKTTLSKIFQCNKYVEVFHKISNSNRHKMRHTENKHFKCKECRKTFCMLSHLTQHKRIQTRVNFYKCEAYGRAFNWSSTLNKHKRIHTGEKPYKCKECGKAFNQTSHLIRHKRIHTEEKPYKCEECGKAFNQSSTLTTHNIIHTGEIPYKCEKCVRAFNQASKLTEHKLIHTGEKRYECEECGKAFNRSSKLTEHKYIHTGEKLYKCEECGKAFNQSSTLTTHKRIHSGEKPYKCEECGKAFKQFSNLTDHKKIHTGEKPYKCEECGKAFNQLSNLTRHKVIHTGEKPYKCGECGKAFNQSSALNTHKIIHTGENPHKCRESGKVFHLSSKLSTCKKIHTGEKLYKCEECGKAFNRSSTLIGHKRIHTGEKPYKCEECGKAFNQSSTLTTHKIIHTEEKQYKCDECGKAST

SEQ ID NO: 15977 - protein, 697 aa, Homo sapiens
MNKSLGPVSFKDVAVDFTQEEWQQLDPEQKITYRDVMLENYSNLVSVGYHIIKPDVISKLEQGEEPWIVEGEFLLQSYPDEVWQTDDLIERIQEEENKPSRQTVFIETLIEERGNVPGKTFDVETNPVPSRKIAYKNSLCDSCEKCLTSVSEYISSDGSYARMKADECSGCGKSLLHIKLEKTHPGDQAYEFNQNGEPYTLNEESLYQKIRILEKPFEYIECQKAFQKDTVFVNHMEEKPYKWNGSEIAFLQMSDLTVHQTSHMEMKPYECSECGKSFCKKSKFIIHQRTHTGEKPYECNQCGKSFCQKGTLTVHQRTHTGEKPYECNECGKNFYQKLHLIQHQRTHSGEKPYECSYCGKSFCQKTHLTQHQRTHSGERPYVCHDCGKTFSQKSALNDHQKIHTGVKLYKCSECGKCFCRKSTLTTHLRTHTGEKPYECNECGKFFSRLSYLTVHYRTHSGEKPYECNECGKTFYLNSALMRHQRVHTGEKPYECNECGKLFSQLSYLTIHHRTHSGVKPYECSECGKTFYQNSALCRHRRIHKGEKPYECYICGKFFSQMSYLTIHHRIHSGEKPYECSECGKTFCQNSALNRHQRTHTGEKAYECYECGKCFSQMSYLTIHHRIHSGEKPFECNECGKAFSRMSYLTVHYRTHSGEKPYECTECGKKFYHKSAFNSHQRIHRRGNMNVIDVGRLL

SEQ ID NO: 15978 - protein, 390 aa, Homo sapiens
MAEIHNGGELCDFMENGEIFSEHSCLNAHMGTENTGDTYDCDEYGENFPMLHNSAPAGETLSVLNQCRKAFSLPPNVHQRTWIGDKSFEYSDCEEAFVDQSHLQANRITHNGETLYEQKQCGRAFTYSTSHAVSVKMHTVEKPYECKECGKFFRYSSYLNSHMRTHTGEKPYECKECGKCFTVSSHLVEHVRIHTGEKPYQCKECGRAFAGRSGLTKHVRIHTGEKPYECNECGKAYNRFYLLTEHFKTHTEEKPFECKVCGKSFRSSSCLKNHFRIHTGIKPYKCKECGKAFTVSSSLHNHVKIHTGEKPYECKDCGKAFATSSQLIEHIRTHTGEKPYICKECGKTFRASSHLQKHVRIHTGEKPYICNECGKAYNRFYLLTKHLKTH

SEQ ID NO: 15979 - protein, 351 aa, Homo sapiens
MSGHPGSWEMNSVAFEDVAVNFTQEEWALLDPSQKNLYRDVMQETFRNLASIGNKGEDQSIEDQYKNSSRNLRHIISHSGNNPYGCEECGKKPCTCKQCQKTSLSVTRVHRDTVMHTGNGHYGCTICEKVFNIPSSFQIHQRNHTGEKPYECMECGKALGFSRSLNRHKRIHTGEKRYECKQCGKAFSRSSHLRDHERTHTGEKPYECKHCGKAFRYSNCLHYHERTHTGEKPYVCMECGKAFSCLSSLQGHIKAHAGEEPYPCKQCGKAFRYASSLQKHEKTHIAQKPYVCNNCGKGFRCSSSLRDHERTHTGEKPYECQKCGKAFSRASTLWKHKKTHTGEKPYKCKKM

SEQ ID NO: 15980 - protein, 623 aa, Homo sapiens
MEAEETMECLQEFPEHHKMILDRLNEQREQDRFTDITLIVDGHHFKAHKAVLAACSKFFYKFFQEFTQEPLVEIEGVSKMAFRHLIEFTYTAKLMIQGEEEANDVWKAAEFLQMLEAIKALEVRNKENSAPLEENTTGKNEAKKRKIAETSNVITESLPSAESEPVEIEVEIAEGTIEVEDEGIETLEEVASAKQSVKYIQSTGSSDDSALALLADITSKYRQGDRKGQIKEDGCPSDPTSKQVEGIEIVELQLSHVKDLFHCEKCNRSFKLFYHFKEHMKSHSTESFKCEICNKRYLRESAWKQHLNCYHLEEGGVSKKQRTGKKIHVCQYCEKQFDHFGHFKEHLRKHTGEKPFECPNCHERFARNSTLKCHLTACQTGVGAKKGRKKLYECQVCNSVFNSWDQFKDHLVIHTGDKPNHCTLCDLWFMQGNELRRHLSDAHNISERLVTEEVLSVETRVQTEPVTSMTIIEQVGKVHVLPLLQVQVDSAQVTVEQVHPDLLQDSQVHDSHMSELPEQVQVSYLEVGRIQTEEGTEVHVEELHVERVNQMPVEVQTELLEADLDHVTPEIMNQEERESSQADAAEAAREDHEDAEDLETKPTVDSEAEKAENEDRTALPVLE

SEQ ID NO: 15981 - protein, 706 aa, Homo sapiens
MALPSPQVLMGLPALLMGPAQHTSWPCGSAVPTLKSMVTFEDVAVYFSQEEWELLDAAQRHLYHSVMLENLELVTSLGSWHGVEGEGAHPKQNVSVEVLQVRIPNADPSTKKANSCDMCGPFLKDILHLAEHQGTQSEEKPYTCGACGRDFWLNANLHQHQKEHSGGKPFRWYKDRDALMKSSKVHLSENPFTCREGGKVILGSCDLLQLQAVDSGQKPYSNLGQLPEVCTTQKLFECSNCGKAFLKSSTLPNHLRTHSEEIPFTCPTGGNFLEEKSILGNKKFHTGEIPHVCKECGKAFSHSSKLRKHQKFHTEVKYYECIACGKTFNHKLTFVHHQRIHSGERPYECDECGKAFSNRSHLIRHEKVHTGERPFECLKCGRAFSQSSNFLRHQKVHTQVRPYECSQCGKSFSRSSALIQHWRVHTGERPYECSECGRAFNNNSNLAQHQKVHTGERPFECSECGRDFSQSSHLLRHQKVHTGERPFECCDCGKAFSNSSTLIQHQKVHTGQRPYECSECRKSFSRSSSLIQHWRIHTGEKPYECSECGKAFAHSSTLIEHWRVHTKERPYECNECGKFFSQNSILIKHQKVHTGEKPYKCSECGKFFSRKSSLICHWRVHTGERPYECSECGRAFSSNSHLVRHQRVHTQERPYECIQCGKAFSERSTLVRHQKVHTRERTYECSQCGKLFSHLCNLAQHKKIHT

SEQ ID NO: 15982 - protein, 654 aa, Homo sapiens
MAFRDVAVDFTQDEWRLLSPAQRTLYREVMLENYSNLVSLGISFSKPELITQLEQGKETWREEKKCSPATCPADPEPELYLDPFCPPGFSSQKFPMQHVLCNHPPWIFTCLCAEGNIQPGDPGPGDQEKQQQASEGRPWSDQAEGPEGEGAMPLFGRTKKRTLGAFSRPPQRQPVSSRNGLRGVELEASPAQSGNPEETDKLLKRIEVLGFGTVNCGECGLSFSKMTNLLSHQRIHSGEKPYVCGVCEKGFSLKKSLARHQKAHSGEKPIVCRECGRGFNRKSTLIIHERTHSGEKPYMCSECGRGFSQKSNLIIHQRTHSGEKPYVCRECGKGFSQKSAVVRHQRTHLEEKTIVCSDCGLGFSDRSNLISHQRTHSGEKPYACKECGRCFRQRTTLVNHQRTHSKEKPYVCGVCGHSFSQNSTLISHRRTHTGEKPYVCGVCGRGFSLKSHLNRHQNIHSGEKPIVCKDCGRGFSQQSNLIRHQRTHSGEKPMVCGECGRGFSQKSNLVAHQRTHSGERPYVCRECGRGFSHQAGLIRHKRKHSREKPYMCRQCGLGFGNKSALITHKRAHSEEKPCVCRECGQGFLQKSHLTLHQMTHTGEKPYVCKTCGRGFSLKSHLSRHRKTTSVHHRLPVQPDPEPCAGQPSDSLYSL

SEQ ID NO: 15983 - protein, 427 aa, Homo sapiens
MTLVTAGGAWTGPGCWHEVKDEESSSEQSISIAVSHVNTSKAGLPAQTALPCDICGPILKDILHLDEHQGTHHGLKLHTCGACGRQFWFSANLHQYQKCYSIEQPLRRDKSEASIVKNCTVSKEPHPSEKPFTCKEEQKNFQATLGGCQQKAIHSKRKTHRSTESGDAFHGEQMHYKCSECGKAFSRKDTLVQHQRIHSGEKPYECSECGKAFSRKATLVQHQRIHTGERPYECSECGKTFSRKDNLTQHKRIHTGEMPYKCNECGKYFSHHSNLIVHQRVHNGARPYKCSDCGKVFRHKSTLVQHESIHTGENPYDCSDCGKSFGHKYTLIKHQRIHTESKPFECIECGKFFSRSSDYIAHQRVHTGERPFVCSKCGKDFIRTSHLVRHQRVHTGERPYECSECGKAYSLSSHLNRHQKVHTAGRL

SEQ ID NO: 15984 - protein, 658 aa, Homo sapiens
MTPGVRVSTDPEQVTFEDVVVGFSQEEWGQLKPAQRTLYRDVMLDTFRLLVSVGHWLPKPNVISLLEQEAELWAVESRLPQGVYPDLETRPKVKLSVLKQGISEEISNSVILVERFLWDGLWYCRGEDTEGHWEWSCESLESLAVPVAFTPVKTPVLEQWQRNGFGENISLNPDLPHQPMTPERQSPHTWGTRGKREKPDLNVLQKTCVKEKPYKCQECGKAFSHSSALIEHHRTHTGERPYECHECLKGFRNSSALTKHQRIHTGEKPYKCTQCGRTFNQIAPLIQHQRTHTGEKPYECSECGKSFSFRSSFSQHERTHTGEKPYECSECGKAFRQSIHLTQHLRIHTGEKPYQCGECGKAFSHSSSLTKHQRIHTGEKPYECHECGKAFTQITPLIQHQRTHTGEKPYECGECGKAFSQSTLLTEHRRIHTGEKPYGCNECGKTFSHSSSLSQHERTHTGEKPYECSQCGKAFRQSTHLTQHQRIHTGEKPYECNDCGKAFSHSSSLTKHQRIHTGEKPYECNQCGRAFSQLAPLIQHQRIHTGEKPYECNQCGRAFSQSSLLIEHQRIHTKEKPYGCNECGKSFSHSSSLSQHERTHTGEKPYECHDCGKSFRQSTHLTQHRRIHTGEKPYACRDCGKAFTHSSSLTKHQRTHTG

SEQ ID NO: 15985 - protein, 540 aa, Homo sapiens
MDSVAFEDVDVNFTQEEWALLDPSQKNLYRDVMWETMRNLASIGKKWKDQNIKDHYKHRGRNLRSHMLERLYQTKDGSQRGGIFSQFANQNLSKKIPGVKLCESIVYGEVSMGQSSLNRHIKDHSGHEPKEYQEYGEKPDTRNQCWKPFSSHHSFRTHEIIHTGEKLYDCKECGKTFFSLKRIRRHIITHSGYTPYKCKVCGKAFDYPSRFRTHERSHTGEKPYECQECGKAFTCITSVRRHMIKHTGDGPYKCKVCGKPFHSLSSFQVHERIHTGEKPFKCKQCGKAFSCSPTLRIHERTHTGEKPYECKQCGKAFSYLPSLRLHERIHTGEKPFVCKQCGKAFRSASTFQIHERTHTGEKPYECKECGEAFSCIPSMRRHMIKHTGEGPYKCKVCGKPFHSLSPFRIHERTHTGEKPYVCKHCGKAFVSSTSIRIHERTHTGEKPYECKQCGKAFSYLNSFRTHEMIHTGEKPFECKRCGKAFRSSSSFRLHERTHTGQKPYHCKECGKAYSCRASFQRHMLTHAEDGPPYKCMWESL

SEQ ID NO: 15986 - protein, 207 aa, Homo sapiens
MNVARFLVEKHTLHVIIDFILSKVSNQQSNLAQHQRVYTGEKPYKCNEWGKALSGKSSLFYHQAIHGVGKLCKCNDCHKVFSNATTIANHWRIHNEDRSYKCNKCGKIFRHRSYLAVYQRTHTGEKPYKYHDCGKVFSQASSYAKHRRIHTGEKPHKCDDCGKVLTSRSHLIRHQRIHTGQKSYKCLKCGKVFSLWALHAEHQKIHF

SEQ ID NO: 15987 - protein, 262 aa, Homo sapiens
MKRHEMVVAKHSALCSRFAQDLWLEQNIKDSFQKVTLSRYGKYGHKNLQLRKGCKSVDECKGHQGGFNGLNQCLKITTSKIFQCNKYVKVMHKFSNSNRHKIRHTENKHFRCKECDKSLCMLSRLTQHKKIHTRENFYKCEECGKTFNWSTNLSKPKKIHTGEKPYKCEVCGKAFHQSSILTKHKIIRTGEKPYKCAHCGKAFKQSSHLTRHKIIHTEEKPYKCEQCGKVFKQSPTLTKHQIIYTGEEPYKCEECGKAFNLS

SEQ ID NO: 15988 - protein, 642 aa, Homo sapiens
MDSVSFEDVAVNFTLEEWALLDSSQKKLYEDVMQETFKNLVCLGKKWEDQDIEDDHRNQGKNRRCHMVERLCESRRGSKCGETTSQMPNVNINKETFTGAKPHECSFCGRDFIHHSSLNRHMRSHTGQKPNEYQEYEKQPCKCKAVGKTFSYHHCFRKHERTHTGVKPYECKQCGKAFIYYQPFQRHERTHAGQKPYECKQCGKTFIYYQSFQKHAHTGKKPYECKQCGKAFICYQSFQRHKRTHTGEKPYECKQCGKAFSCPTYFRTHERTHTGEKPYKCKECGKAFSFLSSFRRHKRTHSGEKPYECKECGKAFFYSASFRAHVIIHTGARPYKCKECGKAFNSSNSCRVHERTHIGEKPYECKRCGKSFSWSISLRLHERTHTGEKPYECKQCHKTFSFSSSLREHETTHTGEKPYECKQCGKTFSFSSSLQRHERTHNAEKPYECKQCGKAFRCSSYFRIHERSHTGEKPYECKQCGKVFIRSSSFRLHERTHTGEKPYECKLCGKTFSFSSSLREHEKIHTGNKPFECKQCGKAFLRSSQIRLHERTHTGEKPYQCKQCGKAFISSSKFRMHERTHTGEKPYRCKQCGKAFRFSSSVRIHERSHTGEKPYECKQCGKAFISSSHFRLHERTHMGEKV

SEQ ID NO: 15989 - protein, 457 aa, Homo sapiens
MSQGSVTFRDVAIDFSQEEWKWLQPAQRDLYRCVMLENYGHLVSLGLSISKPDVVSLLEQGKEPWLGKREVKRDLFSVSESSGEIKDFSPKNVIYDDSSQYLIMERILSQGPVYSSFKGGWKCKDHTEMLQENQGCIRKVTVSHQEALAQHMNISTVERPYGCHECGKTFGRRFSLVLHQRTHTGEKPYACKECGKTFSQISNLVKHQMIHTGKKPHECKDCNKTFSYLSFLIEHQRTHTGEKPYECTECGKAFSRASNLTRHQRIHIGKKQYICRKCGKAFSSGSELIRHQITHTGEKPYECIECGKAFRRFSHLTRHQSIHTTKTPYECNECRKAFRCHSFLIKHQRIHAGEKLYECDECGKVFTWHASLIQHTKSHTGEKPYACAECDKAFSRSFSLILHQRTHTGEKPYVCKVCNKSFSWSSNLAKHQRTHTLDNPYEYENSFNYHSFLTEHQ

SEQ ID NO: 15990 - protein, 474 aa, Homo sapiens
MELLTFRDVAIEFSPEEWKCLDPDQQNLYRDVMLENYRNLVSLGVAISNPDLVTCLEQRKEPYNVKIHKIVARPPAMCSHFTQDHWPVQGIEDSFHKLILRRYEKCGHDNLQLRKGCKSLNECKLQKGGYNEFNECLSTTQSKILQCKASVKVVSKFSNSNKRKTRHTGEKHFKECGKSFQKFSHLTQHKVIHAGEKPYTCEECGKAFKWSLIFNEHKRIHTGEKPFTCEECGSIFTTSSHFAKHKIIHTGEKPYKCEECGKAFNRFTTLTKHKRIHAGEKPITCEECRKIFTSSSNFAKHKRIHTGEKPYKCEECGKAFNRSTTLTKHKRIHTGEKPYTCEECGKAFRQSSKLNEHKKVHTGERPYKCDECGKAFGRSRVLNEHKKIHTGEKPYKCEECGKAFRRSTDRSQHKKIHSADKPYKCKECDKAFKQFSLLSQHKKIHTVDKPYKCKDCDKAFKRFSHLNKHKKIHT

SEQ ID NO: 15991 - protein, 1687 aa, Homo sapiens
MTDPLLDSQPASSTGEMDGLCPELLLIPPPLSNRGILGPVQSPCPSRDPAPIPTEPGCLLVEATATEEGPGNMEIIVETVAGTLTPGAPGETPAPKLPPGEREPSQEAGTPLPGQETAEEENVEKEEKSDTQKDSQKAVDKGQGAQRLEGDVVSGTESLFKTHMCPECKRCFKKRTHLVEHLHLHFPDPSLQCPNCQKFFTSKSKLKTHLLRELGEKAHHCPLCHYSAVERNALNRHMASMHEDISNFYSDTYACPVCREEFRLSQALKEHLKSHTAAAAAEPLPLRCFQEGCSYAAPDRKAFIKHLKETHGVRAVECRHHSCPMLFATAEAMEAHHKSHYAFHCPHCDFACSNKHLFRKHKKQGHPGSEELRCTFCPFATFNPVAYQDHVGKMHAHEKIHQCPECNFATAHKRVLIRHMLLHTGEKPHKCELCDFTCRDVSYLSKHMLTHSNTKDYMCTECGYVTKWKHYLRVHMRKHAGDLRYQCNQCSYRCHRADQLSSHKLRHQGKSLMCEVCAFACKRKYELQKHMASQHHPGTPAPLYPCHYCSYQSRHKQAVLSHENCKHTRLREFHCALCDYRTFSNTTLLFHKRKAHGYVPGDQAWQLRYASQEPEGAMQGPTPPPDSEPSNQLSARPEGPGHEPGTVVDPSLDQALPEMSEEVNTGRQEGSEAPHGGDLGGSPSPAEVEEGSCTLHLEALGVELESVTEPPLEEVTETAPMEFRPLGLEGPDGLEGPELSSFEGIGTSDLSAEENPLLEKPVSEPSTNPPSLEEAPNNWVGTFKTTPPAETAPLPPLPESESLLKALRRQDKEQAEALVLEGRVQMVVIQGEGRAFRCPHCPFITRREKALNLHSRTGCQGRREPLLCPECGASFKQQRGLSTHLLKKCPVLLRKNKGLPRPDSPIPLQPVLPGTQASEDTESGKPPPASQEAELLLPKDAPLELPREPEETEEPLATVSGSPVPPAGNSLPTEAPKKHCFDPVPPAGNSSPTEAPKKHHLDPVPPAGNSSPTEALKKHRFEQGKFHCNSCPFLCSRLSSITSHVAEGCRGGRGGGGKRGTPQTQPDVSPLSNGDSAPPKNGSTESSSGDGDTVLVQKQKGARFSCPTCPFSCQQERALRTHQIRGCPLEESGELHCSLCPFTAPAATALRLHQKRRHPTAAPARGPRPHLQCGDCGFTCKQSRCMQQHRRLKHEGVKPHQCPFCDFSTTRRYRLEAHQSRHTGIGRIPCSSCPQTFGTNSKLRLHRLRVHDKTPTHFCPLCDYSGYLRHDITRHVNSCHQGTPAFACSQCEAQFSSETALKQHALRRHPEPAQPAPGSPAETTEGPLHCSRCGLLCPSPASLRGHTRKQHPRLECGACQEAFPSRLALDEHRRQQHFSHRCQLCDFAARERVGLVKHYLEQHEETSAAVAASDGDGDAGQPPLHCPFCDFTCRHQLVLDHHVKGHGGTRLYKCTDCAYSTKNRQKITWHSRIHTGEKPYHCHLCPYACADPSRLKYHMRIHKEERKYLCPECGYKCKWVNQLKYHMTKHTGLKPYQCPECEYCTNRADALRVHQETRHREARAFMCEQCGKAFKTRFLLRTHLRKHSEAKPYVCNVCHRAFRWAAGLRHHALTHTDRHPFFCRLCNYKAKQKFQVVKHVRRHHPDQADPNQGVGKDPTTPTVHLHDVQLEDPSPPAPAAPHTGPEG

SEQ ID NO: 15992 - protein, 638 aa, Homo sapiens
MLLAQINRDSQGMTEFPGGGMEAQHVTLCLTEAVTVADGDNLENMEGVSLQAVTLADGSTAYIQHNSKDAKLIDGQVIQLEDGSAAYVQHVPIPKSTGDSLRLEDGQAVQLEDGTTAFIHHTSKDSYDQSALQAVQLEDGTTAYIHHAVQVPQSDTILAIQADGTVAGLHTGDATIDPDTISALEQYAAKVSIDGSESVAGTGMIGENEQEKKMQIVLQGHATRVTAKSQQSGEKAFRCEYDGCGKLYTTAHHLKVHERSHTGDRPYQCEHAGCGKAFATGYGLKSHVRTHTGEKPYRCSEDNCTKSFKTSGDLQKHIRTHTGERPFKCPFEGCGRSFTTSNIRKVHVRTHTGERPYYCTEPGCGRAFASATNYKNHVRIHTGEKPYVCTVPGCDKRFTEYSSLYKHHVVHTHSKPYNCNHCGKTYKQISTLAMHKRTAHNDTEPIEEEQEAFFEPPPGQGEDVLKGSQITYVTGVEGDDVVSTQVATVTQSGLSQQVTLISQDGTQHVNISQADMQAIGNTITMVTQDGTPITVPAHDAVISSAGTHSVAMVTAEGTEGEQVAIVAQDLAAFHTASSEMGHQQHSHHLVTTETRPLTLVATSNGTQIAVQLGEQPSLEEAIRIASRIQQGETPGLDD

SEQ ID NO: 15993 - protein, 292 aa, Homo sapiens
MSHLSQQRIYSGENPFACKVCGKVFSHKSNLTEHEHFHTREKPFECNECGKAFSQKQYVIKHQNTHTGEKLFECNECGKSFSQKENLLTHQKIHTGEKPFECKDCGKAFIQKSNLIRHQRTHTGEKPFVCKECGKTFSGKSNLTEHEKIHIGEKPFKCSECGTAFGQKKYLIKHQNIHTGEKPYECNECGKAFSQRTSLIVHVRIHSGDKPYECNVCGKAFSQSSSLTVHVRSHTGEKPYGCNECGKAFSQFSTLALHLRIHTGKKPYQCSECGKAFSQKSHHIRHQKIHTH

SEQ ID NO: 15994 - protein, 794 aa, Homo sapiens
MNIDDKLEGLFLKCGGIDEMQSSRTMVVMGGVSGQSTVSGELQDSVLQDRSMPHQEILAADEVLQESEMRQQDMISHDELMVHEETVKNDEEQMETHERLPQGLQYALNVPISVKQEITFTDVSEQLMRDKKQIREPVDLQKKKKRKQRSPAKILTINEDGSLGLKTPKSHVCEHCNAAFRTNYHLQRHVFIHTGEKPFQCSQCDMRFIQKYLLQRHEKIHTGEKPFRCDECGMRFIQKYHMERHKRTHSGEKPYQCEYCLQYFSRTDRVLKHKRMCHENHDKKLNRCAIKGGLLTSEEDSGFSTSPKDNSLPKKKRQKTEKKSSGMDKESALDKSDLKKDKNDYLPLYSSSTKVKDEYMVAEYAVEMPHSSVGGSHLEDASGEIHPPKLVLKKINSKRSLKQPLEQNQTISPLSTYEESKVSKYAFELVDKQALLDSEGNADIDQVDNLQEGPSKPVHSSTNYDDAMQFLKKKRYLQAASNNSREYALNVGTIASQPSVTQAAVASVIDESTTASILESQALNVEIKSNHDKNVIPDEVLQTLLDHYSHKANGQHEISFSVADTEVTSSISINSSEVPEVTPSENVGSSSQASSSDKANMLQEYSKFLQQALDRTSQNDAYLNSPSLNFVTDNQTLPNQPAFSSIDKQVYATMPINSFRSGMNSPLRTTPDKSHFGLIVGDSQHSFPFSGDETNHASATSTQDFLDQVTSQKKAEAQPVHQAYQMSSFEQPFRAPYHGSRAGIATQFSTANGQVNLRGPGTSAEFSEFPLVNVNDNRAGMTSSPDATTGQTFG

SEQ ID NO: 15995 - protein, 437 aa, Homo sapiens
MAAATLRTPTQGTVTFEDVAVHFSWEEWGLLDEAQRCLYRDVMLENLALLTSLDVHHQKQHLGEKHFRSNVGRALFVKTCTFHVSGEPSTCREVGKDFLAKLGFLHQQAAHTGEQSNSKSDGGAISHRGKTHYNCGEHTKAFSGKHTLVQQQRTLTTERCYICSECGKSFSKSYSLNDHWRLHTGEKPYECRECGKSFRQSSSLIQHRRVHTAVRPHECDECGKLFSNKSNLIKHRRVHTGERPYECSECGKSFSQRSALLQHRGVHTGERPYECSECGKFFTYHSSLIKHQKVHSGSRPYECSECGKSFSQNSSLIEHHRVHTGERPYKCSECGKSFSQRSALLQHRGVHTGERPYECSECGKFFPYSSSLRKHQRVHTGSRPYECSECGKSFTQNSGLIKHRRVHTGEKPYECTECGKSFSHNSSLIKHQRIHSR

SEQ ID NO: 15996 - protein, 538 aa, Homo sapiens
MTTFKEAVTFKDVAVVFTEEELGLLDPAQRKLYRDVMLENFRNLLSVGHQPFHQDTCHFLREEKFWMMGTATQREGNSGGKIQTELESVPEAGAHEEWSCQQIWEQIAKDLTRSQDSIINNSQFFENGDVPSQVEAGLPTIHTGQKPSQGGKCKQSISDVPIFDLPQQLYSEEKSYTCDECGKSICYISALHVHQRVHVGEKLFMCDVCGKEFSQSSHLQTHQRVHTGEKPFKCEQCGKGFSRRSALNVHRKLHTGEKPYICEACGKAFIHDSQLKEHKRIHTGEKPFKCDICGKTFYFRSRLKSHSMVHTGEKPFRCDTCDKSFHQRSALNRHCMVHTGEKPYRCEQCGKGFIGRLDFYKHQVVHTGEKPYNCKECGKSFRWSSCLLNHQRVHSGEKSFKCEECGKGFYTNSQLSSHQRSHSGEKPYKCEECGKGYVTKFNLDLHQRVHTGERPYNCKECGKNFSRASSILNHKRLHCQKKPFKCEDCGKRLVHRTYRKDQPRDYSGENPSKCEDCGRRYKRRLNLDILLSLFLNDT

SEQ ID NO: 15997 - protein, 506 aa, Homo sapiens
MPANGTSPQRFPALIPGEPGRSFEGSVSFEDVAVDFTRQEWHRLDPAQRTMHKDVMLETYSNLASVGLCVAKPEMIFKLERGEELWILEEESSGHGYSGSLSLLCGNGSVGDNALRHDNDLLHHQKIQTLDQNVEYNGCRKAFHEKTGFVRRKRTPRGDKNFECHECGKAYCRKSNLVEHLRIHTGERPYECGECAKTFSARSYLIAHQKTHTGERPFECNECGKSFGRKSQLILHTRTHTGERPYECTECGKTFSEKATLTIHQRTHTGEKPYECSECGKTFRVKISLTQHHRTHTGEKPYECGECGKNFRAKKSLNQHQRIHTGEKPYECGECGKFFRMKMTLNNHQRTHTGEKPYQCNECGKSFRVHSSLGIHQRIHTGEKPYECNECGNAFYVKARLIEHQRMHSGEKPYECSECGKIFSMKKSLCQHRRTHTGEKPYECSECGNAFYVKVRLIEHQRIHTGERPFECQECGKAFCRKAHLTEHQRTHIGWSWRCTMKKASH

SEQ ID NO: 15998 - protein, 682 aa, Homo sapiens
MPSLRTRREEAEMELSVPGPSPWTPAAQARVRDAPAVTHPGSAACGTPCCSDTELEAICPHYQQPDCDTRTEDKEFLHKEDIHEDLESQAEISENYAGDVSQVPELGDLCDDVSERDWGVPEGRRLPQSLSQEGDFTPAAMGLLRGPLGEKDLDCNGFDSRFSLSPNLMACQEIPTEERPHPYDMGGQSFQHSVDLTGHEGVPTAESPLICNECGKTFQGNPDLIQRQIVHTGEASFMCDDCGKTFSQNSVLKNRHRSHMSEKAYQCSECGKAFRGHSDFSRHQSHHSSERPYMCNECGKAFSQNSSLKKHQKSHMSEKPYECNECGKAFRRSSNLIQHQRIHSGEKPYVCSECGKAFRRSSNLIKHHRTHTGEKPFECGECGKAFSQSAHLRKHQRVHTGEKPYECNDCGKPFSRVSNLIKHHRVHTGEKPYKCSDCGKAFSQSSSLIQHRRIHTGEKPHVCNVCGKAFSYSSVLRKHQIIHTGEKPYRCSVCGKAFSHSSALIQHQGVHTGDKPYACHECGKTFGRSSNLILHQRVHTGEKPYECTECGKTFSQSSTLIQHQRIHNGLKPHECNQCGKAFNRSSNLIHHQKVHTGEKPYTCVECGKGFSQSSHLIQHQIIHTGERPYKCSECGKAFSQRSVLIQHQRIHTGVKPYDCAACGKAFSQRSKLIKHQLIHTRE

SEQ ID NO: 15999 - protein, 818 aa, Homo sapiens
MALTQVRLTFRDVAIEFSQEEWKCLDPAQRILYRDVMLENYWNLVSLGLCHFDMNIISMLEEGKEPWTVKSCVKIARKPRTPECVKGVVTDIPPKCTIKDLLPKEKSSTEAVFHTVVLERHESPDIEDFSFKEPQKNVHDFECQWRDDTGNYKGVLMAQKEGKRDQRDRRDIENKLMNNQLGVSFHSHLPELQLFQGEGKMYECNQVEKSTNNGSSVSPLQQIPSSVQTHRSKKYHELNHFSLLTQRRKANSCGKPYKCNECGKAFTQNSNLTSHRRIHSGEKPYKCSECGKTFTVRSNLTIHQVIHTGEKPYKCHECGKVFRHNSYLATHRRIHTGEKPYKCNECGKAFRGHSNLTTHQLIHTGEKPFKCNECGKLFTQNSHLISHWRIHTGEKPYKCNECGKAFSVRSSLAIHQTIHTGEKPYKCNECGKVFRYNSYLGRHRRVHTGEKPYKCNECGKAFSMHSNLATHQVIHTGTKPFKCNECSKVFTQNSQLANHRRIHTGEKPYKCNECGKAFSVRSSLTTHQAIHSGEKPYKCIECGKSFTQKSHLRSHRGIHSGEKPYKCNECGKVFAQTSQLARHWRVHTGEKPYKCNDCGRAFSDRSSLTFHQAIHTGEKPYKCHECGKVFRHNSYLATHRRIHTGEKPYKCNECGKAFSMHSNLTTHKVIHTGEKPYKCNQCGKVFTQNSHLANHQRTHTGEKPYRCNECGKAFSVRSSLTTHQAIHTGKKPYKCNECGKVFTQNAHLANHRRIHTGEKPYRCTECGKAFRVRSSLTTHMAIHTGEKRYKCNECGKVFRQSSNLASHHRMHTGEKPYK

SEQ ID NO: 16000 - protein, 485 aa, Homo sapiens
MATEPKKAAAQNSPEDEGLLIVKIEEEEFIHGQDTCLQRSELLKQELCRQLFRQFCYQDSPGPREALSRLRELCCQWLKPEIHTKEQILELLVLEQFLTILPGDLQAWVHEHYPESGEEAVTILEDLERGTDEAVLQVQAHEHGQEIFQKKVSPPGPALNVKLQPVETKAHFDSSEPQLLWDCDNESENSRSMPKLEIFEKIESQRIISGRISGYISEASGESQDICKSAGRVKRQWEKESGESQRLSSAQDEGFGKILTHKNTVRGEIISHDGCERRLNLNSNEFTHQKSCKHGTCDQSFKWNSDFINHQIIYAGEKNHQYGKSFKSPKLAKHAAVFSGDKTHQCNECGKAFRHSSKLARHQRIHTGERCYECNECGKSFAESSDLTRHRRIHTGERPFGCKECGRAFNLNSHLIRHQRIHTREKPYECSECGKTFRVSSHLIRHFRIHTGEKPYECSECGRAFSQSSNLSQHQRIHMRENLLM

SEQ ID NO: 16001 - protein, 603 aa, Homo sapiens
MSPGLLTTRKEALMAFRDVAVAFTQKEWKLLSSAQRTLYREVMLENYSHLVSLGIAFSKPKLIEQLEQGDEPWREENEHLLDLCPEPRTEFQPSFPHLVAFSSSQLLRQYALSGHPTQIFPSSSAGGDFQLEAPRCSSEKGESGETEGPDSSLRKRPSRISRTFFSPHQGDPVEWVEGNREGGTDLRLAQRMSLGGSDTMLKGADTSESGAVIRGNYRLGLSKKSSLFSHQKHHVCPECGRGFCQRSDLIKHQRTHTGEKPYLCPECGRRFSQKASLSIHQRKHSGEKPYVCRECGRHFRYTSSLTNHKRIHSGERPFVCQECGRGFRQKIALLLHQRTHLEEKPFVCPECGRGFCQKASLLQHQSSHTGERPFLCLECGRSFRQQSLLLSHQVTHSGEKPYVCAECGHSFRQKVTLIRHQRTHTGEKPYLCPQCGRGFSQKVTLIGHQRTHTGEKPYLCPDCGRGFGQKVTLIRHQRTHTGEKPYLCPKCGRAFGFKSLLTRHQRTHSEEELYVDRVCGQGLGQKSHLISDQRTHSGEKPCICDECGRGFGFKSALIRHQRTHSGEKPYVCRECGRGFSQKSHLHRHRRTKSGHQLLPQEVF

SEQ ID NO: 16002 - protein, 662 aa, Homo sapiens
MNLTEDYMVFEDVAIHFSQEEWGILNDVQRHLHSDVMLENFALLSSVGCWHGAKDEEAPSKQCVSVGVSQVTTLKPALSTQKAQPCETCSSLLKDILHLAEHDGTHPKRTAKLYLHQKEHLREKLTRSDEGRPSFVNDSVHLAKRNLTCMQGGKDFTGDSDLQQQALHSGWKPHRDTHGVEAFQSGQNNYSCTQCGKDFCHQHTLFEHQKIHTEERPYECSECGKLFRYNSDLIKHQRNHTGERPYKCSECGKAFSLKYNVVQHQKIHTGERPYECSECGKAFLRKSHLLQHQRIHTRPRPYVCSECGKAFLTQAHLVGHQKIHTGERPYGCNECGKYFMYSSALIRHQKVHTGERPFYCCECGKFFMDSCTLIIHQRVHTGEKPYECNECGKFFRYRSTLIRHQKVHTGEKPYECSECGKFFMDTSTLIIHQRVHTGEKPYECNKCGKFFRYCFTLNRHQRVHSGERPYECSECGKFFVDSCTLKSHQRVHTGERPFECSICGKSFRCRSTLDTHQRIHTGERPYECSECGKFFRHNSNHIRHRRNHFGERSFECTECGRVFSQNSHLIRHQKVHTRERTYKCSKCGKFFMDSSTLISHERVHTGEKPYECSECGKVFRYNSSLIKHRRIHTGERPYQCSECGRVFNQNSHLIQHQKVHTR

SEQ ID NO: 16003 - protein, 407 aa, Homo sapiens
MAAKMEITLSSNTEASSKQERHIIAKLEEKRGPPLQKNCPDPELCRQSFRRFCYQEVSGPQEALSQLRQLCRQWLQPELHTKEQILELLVMEQFLTILPPEIQARVRHRCPMSSKEIVTLVEDFHRASKKPKQWVAVCMQGQKVLLEKTGSQLGEQELPDFQPQTPRRDLRESSPAEPSQAGAYDRLSPHHWEKSPLLQEPTPKLAGTEAPRMRSDNKENPQQEGAKGAKPCAVSAGRSKGNGLQNPEPRGANMSEPRLSRRQVSSPNAQKPFAHYQRHCRVEYISSPLKSHPLRELKKSKGGKRSLSNRLQHLGHQPTRSAKKPYKCDDCGKSFTWNSELKRHKRVHTGERPYTCGECGNCFGRQSTLKLHQRIHTGEKPYQCGQCGKSFRQSSNLHQHHRLHHGD

SEQ ID NO: 16004 - protein, 711 aa, Homo sapiens
MPADVNLSQKPQVLGPEKQDGSCEASVSFEDVTVDFSREEWQQLDPAQRCLYRDVMLELYSHLFAVGYHIPNPEVIFRMLKEKEPRVEEAEVSHQRCQEREFGLEIPQKEISKKASFQKDMVGEFTRDGSWCSILEELRLDADRTKKDEQNQIQPMSHSAFFNKKTLNTESNCEYKDPGKMIRTRPHLASSQKQPQKCCLFTESLKLNLEVNGQNESNDTEQLDDVVGSGQLFSHSSSDACSKNIHTGETFCKGNQCRKVCGHKQSLKQHQIHTQKKPDGCSECGGSFTQKSHLFAQQRIHSVGNLHECGKCGKAFMPQLKLSVYLTDHTGDIPCICKECGKVFIQRSELLTHQKTHTRKKPYKCHDCGKAFFQMLSLFRHQRTHSREKLYECSECGKGFSQNSTLIIHQKIHTGERQYACSECGKAFTQKSTLSLHQRIHSGQKSYVCIECGQAFIQKAHLIVHQRSHTGEKPYQCHNCGKSFISKSQLDIHHRIHTGEKPYECSDCGKTFTQKSHLNIHQKIHTGERHHVCSECGKAFNQKSILSMHQRIHTGEKPYKCSECGKAFTSKSQFKEHQRIHTGEKPYVCTECGKAFNGRSNFHKHQITHTRERPFVCYKCGKAFVQKSELITHQRTHMGEKPYECLDCGKSFSKKPQLKVHQRIHTGERPYVCSECGKAFNNRSNFNKHQTTHTRDKSYKCSYSVKGFTKQ

SEQ ID NO: 16005 - protein, 549 aa, Homo sapiens
MPVDLGQALGLLPSLAKAEDSQFSESDAALQEELSSPETARQLFRQFRYQVMSGPHETLKQLRKLCFQWLQPEVHTKEQILEILMLEQFLTILPGEIQMWVRKQCPGSGEEAVTLVESLKGDPQRLWQWISIQVLGQDILSEKMESPSCQVGEVEPHLEVVPQELGLENSSSGPGELLSHIVKEESDTEAELALAASQPARLEERLIRDQDLGASLLPAAPQEQWRQLDSTQKEQYWDLMLETYGKMVSGAGISHPKSDLTNSIEFGEELAGIYLHVNEKIPRPTCIGDRQENDKENLNLENHRDQELLHASCQASGEVPSQASLRGFFTEDEPGCFGEGENLPEALQNIQDEGTGEQLSPQERISEKQLGQHLPNPHSGEMSTMWLEEKRETSQKGQPRAPMAQKLPTCRECGKTFYRNSQLIFHQRTHTGETYFQCTICKKAFLRSSDFVKHQRTHTGEKPCKCDYCGKGFSDFSGLRHHEKIHTGEKPYKCPICEKSFIQRSNFNRHQRVHTGEKPYKCSHCGKSFSWSSSLDKHQRSHLGKKPFQ

SEQ ID NO: 16006 - protein, 692 aa, Homo sapiens
MRACAGSTREAGSGAQDLSTLLCLEESMEEQDEKPPEPPKACAQDSFLPQEIIIKVEGEDTGSLTIPSQEGVNFKIVTVDFTREEQGTWNPAQRTLDRDVILENHRDLVSWDLATAVGKKDSTSKQRIFDEEPANGVKIERFTRDDPWLSSCEEVDDCKDQLEKQQEKQEILLQEVAFTQRKAVIHERVCKSDETGEKSGLNSSLFSSPVIPIRNHFHKHVSHAKKWHLNAAVNSHQKINENETLYENNECGKPPQSIHLIQFTRTQTKDKCYGFSDRIQSFCHGTPLHIHEKIHGGGKTFDFKECGQVLNPKISHNEQQRIPFEESQYKCSETSHSSSLTQNMRNNSEEKPFECNQCGKSFSWSSHLVAHQRTHTGEKPYECSECGKSFSRSSHLVSHQRTHTGEKPYRCNQCGKSFSQSYVLVVHQRTHTGEKPYECNQCGKSFRQSYKLIAHQRTHTGEKPYECNQCGKSFIQSYKLIAHQRIHTGEKPYECNQCGKSFSQSYKLVAHQRTHTGEKPFECNQCGKSFSWSSQLVAHQRTHTGEKPYECSECGKSFNRSSHLVMHQRIHTGEKPYECNQCGKSFSQSYVLVVHQRTHTGEKPYECSQCGKSFRQSSCLTQHQRTHTGEKPFECNQCGKTFSLSARLIVHQRTHTGEKPFTCIQCGKAFINSYKLIRHQATHTEEKLYECN

SEQ ID NO: 16007 - protein, 571 aa, Homo sapiens
MPQVTFNDVAIDFTHEEWGWLSSAQRDLYKDVMVQNYENLVSVAGLSVTKPYVITLLEDGKEPWMMEKKLSKGMIPDWESRWENKELSTKKDNYDEDSPQTVIIEKVVKQSYEFSNSKKNLEYIEKLEGKHGSQVDHFRPAILTSRESPTADSVYKYNIFRSTFHSKSTLSEPQKISAEGNSHKYDILKKNLPKKSVIKNEKVNGGKKLLNSNKSGAAFSQGKSLTLPQTCNREKIYTCSECGKAFGKQSILNRHWRIHTGEKPYECRECGKTFSHGSSLTRHLISHSGEKPYKCIECGKAFSHVSSLTNHQSTHTGEKPYECMNCGKSFSRVSHLIEHLRIHTQEKLYECRICGKAFIHRSSLIHHQKIHTGEKPYECRECGKAFCCSSHLTRHQRIHTMEKQYECNKCLKVFSSLSFLVQHQSIHTEEKPFECQKCRKSFNQLESLNMHLRNHIRLKPYECSICGKAFSHRSSLLQHHRIHTGEKPYECIKCGKTFSCSSNLTVHQRIHTGEKPYKCNECGKAFSKGSNLTAHQRVHNGEKPNSVVSVEKPLDYMNHYTCEKSYRRETV

SEQ ID NO: 16008 - protein, 639 aa, Homo sapiens
MTPASASGEDSGSFYSWQKAKREQGLVTFEDVAVDFTQEEWQYLNPPQRTLYRDVMLETYSNLVFVGQQVTKPNLILKLEVEECPAEGKIPFWNFPEVCQVDEQIERQHQDDQDKCLLMQVGFSDKKTIITKSARDCHEFGNILHLSTNLVASIQRPDKHESFGNNMVDNLDLFSRSSAENKYDNGCAKLFFHTEYEKTNPGMKPYGYKECGKGLRRKKGLSLHQRIKNGEKPFECTACRKTFSKKSHLIVHWRTHTGEKPFGCTECGKAFSQKSQLIIHLRTHTGERPFECPECGKAFREKSTVIIHYRTHTGEKPYECNECGKAFTQKSNLIVHQKTHTGEKTYECTKCGESFIQKLDLIIHHSTHTGKKPHECNECKKTFSDKSTLIIHQRTHTGEKPHKCTECGKSFNEKSTLIVHQRTHTGEKPYECDVCGKTFTQKSNLGVHQRTHSGEKPFECNECEKAFSQKSYLMLHQRGHTGEKPYECNECEKAFSQKSYLIIHQRTHTEEKPYKCNECGKAFREKSKLIIHQRIHTGEKPYECPVCWKAFSQKSQLIIHQRTHTGEKPYACTECGKAFREKSTFTVHQRTHTGEKPYKCTECGKAFTQKSNLIVHQRTHAGKKAHGRGHTRKSKFMAH

SEQ ID NO: 16009 - protein, 751 aa, Homo sapiens
MEDLSSPDSTLLQGGHNLLSSASFQEAVTFKDVIVDFTQEEWKQLDPGQRDLFRDVTLENYTHLVSIGLQVSKPDVISQLEQGTEPWIMEPSIPVGTCADWETRLENSVSAPEPDISEEELSPEVIVEKHKRDDSWSSNLLESWEYEGSLERQQANQQTLPKEIKVTEKTIPSWEKGPVNNEFGKSVNVSSNLVTQEPSPEETSTKRSIKQNSNPVKKEKSCKCNECGKAFSYCSALIRHQRTHTGEKPYKCNECEKAFSRSENLINHQRIHTGDKPYKCDQCGKGFIEGPSLTQHQRIHTGEKPYKCDECGKAFSQRTHLVQHQRIHTGEKPYTCNECGKAFSQRGHFMEHQKIHTGEKPFKCDECDKTFTRSTHLTQHQKIHTGEKTYKCNECGKAFNGPSTFIRHHMIHTGEKPYECNECGKAFSQHSNLTQHQKTHTGEKPYDCAECGKSFSYWSSLAQHLKIHTGEKPYKCNECGKAFSYCSSLTQHRRIHTREKPFECSECGKAFSYLSNLNQHQKTHTQEKAYECKECGKAFIRSSSLAKHERIHTGEKPYQCHECGKTFSYGSSLIQHRKIHTGERPYKCNECGRAFNQNIHLTQHKRIHTGAKPYECAECGKAFRHCSSLAQHQKTHTEEKPYQCNKCEKTFSQSSHLTQHQRIHTGEKPYKCNECDKAFSRSTHLTEHQNTHTGEKPYNCNECRKTFSQSTYLIQHQRIHSGEKPFGCNDCGKSFRYRSALNKHQRLHPGI

SEQ ID NO: 16010 - protein, 626 aa, Homo sapiens
MASPSPPPESKGLLTFEDVAVFFTQEEWDYLDPAQRSLYKDVMMENYGNLVSLDVLNRDKDEEPTVKQEIEEIEEEVEPQGVIVTRIKSEIDQDPMGRETFELVGRLDKQRGIFLWEIPRESLTQEQRMFRENTNIIRKRPNSEEKCHKCEECGKGFVRKAHFIQHQRVHTGEKPFQCNECGKSFSRSSFVIEHQRIHTGERPYECNYCGKTFSVSSTLIRHQRIHTGERPYQCNQCKQSFSQRRSLVKHQRIHTGEKPHKCSDCGKAFSWKSHLIEHQRTHTGEKPYHCTKCKKSFSRNSLLVEHQRIHTGERPHKCGECGKAFRLSTYLIQHQKIHTGEKPFLCIECGKSFSRSSFLIEHQRIHTGERPYQCKECGKSFSQLCNLTRHQRIHTGDKPHKCEECGKAFSRSSGLIQHQRIHTREKTYPYNETKESFDPNCSLVIQQEVYPKEKSYKCDECGKTFSVSAHLVQHQRIHTGEKPYLCTVCGKSFSRSSFLIEHQRIHTGERPYLCRQCGKSFSQLCNLIRHQGVHTGNKPHKCDECGKAFSRNSGLIQHQRIHTGEKPYKCEKCDKSFSQQRSLVNHQKIHAEVKTQETHECDACGEAFNCRISLIQHQKLHTAWMQ

SEQ ID NO: 16011 - protein, 458 aa, Homo sapiens
MAAMPLKAQYQEMVTFEDVAVHFTKTEWTGLSPAQRALYRSVMLENFGNLTALGYPVPKPALISLLERGDMAWGLEAQDDPPAERTKNVCKDVETNIDSESTLIQGISEERDGMMSHGQLKSVPQRTDFPETRNVEKHQDIPTVKNIQGKVPRIPCARKPFICEECGKSFSYFSYYARHQRIHTGEKPFECSECGKAFNGNSSLIRHQRIHTGERPYQCEECGRAFNDNANLIRHQRIHSGDRPYYCTECGNSFTSSSEFVIHQRIHTGEKPYECNECGKAFVGNSPLLRHQKIHTGEKPYECNECGKSFGRTSHLSQHQRIHTGEKPYSCKVCGQAFNFHTKLTRHQRIHSEEKPFDCVDCGKAFSAQEQLKRHLRIHTQESSYVCDECGKALTSKRNLHQHQRIHTGEKPYECSKYEKAFGTSSQLGHLEHVYSGEKPVLDICRFGLPEFFTPFYW

SEQ ID NO: 16012 - protein, 629 aa, Homo sapiens
MTLLTFRDVAIEFSLEEWKCLDLAQQNLYRDVMLENYRNLFSVGLTVCKPGLITCLEQRKEPWNVKRQEAADGHPEMGFHHATQACLELLGSSDLPASASQSAGITGVNHRAQPGLNVSVDKFTALCSPGVLQTVKWFLEFRCIFSLAMSSHFTQDLLPEQGIQDAFPKRILRGYGNCGLDNLYLRKDWESLDECKLQKDYNGLNQCSSTTHSKIFQYNKYVKIFDNFSNLHRRNISNTGEKPFKCQECGKSFQMLSFLTEHQKIHTGKKFQKCGECGKTFIQCSHFTEPENIDTGEKPYKCQECNNVIKTCSVLTKNRIYAGGEHYRCEEFGKVFNQCSHLTEHEHGTEEKPCKYEECSSVFISCSSLSNQQMILAGEKLSKCETWYKGFNHSPNPSKHQRNEIGGKPFKCEECDSIFKWFSDLTKHKRIHTGEKPYKCDECGKAYTQSSHLSEHRRIHTGEKPYQCEECGKVFRTCSSLSNHKRTHSEEKPYTCEECGNIFKQLSDLTKHKKTHTGEKPYKCDECGKNFTQSSNLIVHKRIHTGEKPYKCEECGRVFMWFSDITKHKKTHTGEKPYKCDECGKNFTQSSNLIVHKRIHTGEKPYKCEKCGKAFTQFSHLTVHESIHT

SEQ ID NO: 16013 - protein, 1029 aa, Homo sapiens
MTRENVAHNALRQEGLVKGKDDTWKWGTSFQGSSSSVWETSHLHFRQLRYHETSGPQEALSRLRELCRRWLRPEARTKAQILELLVLEQFLSILPGEIRTWVQLHHPGSGEEAVALVEELQKDLDGPAIQVPVLVKDQDTLQKVVSAPGTTLPPVLPGSHIAAEICPHPPTDLVAFNLQDPQHDSPAPEASALSQEENPRNQLMALMLLTAQPQELVMFEEVSVCFTSEEWACLGPIQRALYWDVMLENYGNVTSLEWETMTENEEVTSKPSSSQRADSHKGTSKRLQGSVPQVLDFEEECEWQVLASQWGNETDERADTVKKVSLCERDKKKRTPPEKQGQKWKELGDSLTFGSAISESLIGTEGKKFYKCDMCCKHFNKISHLINHRRIHTGEKPHKCKECGKGFIQRSSLLMHLRNHSGEKPYKCNECGKAFSQSAYLLNHQRIHTGEKPYKCKECGKGFYRHSGLIIHLRRHSGERPYKCNECGKVFSQNAYLIDHQRLHKGEEPYKCNKCQKAFILKKSLILHQRIHSGEKPYKCDECGKTFAQTTYLIDHQRLHSAENPYKCKECGKVFIRSKSLLLHQRVHTEKKTFGCKKCGKIFSSKSNFIDHKRMHSREKPYKCTECGKAFTQSAYLFDHQRLHNGEKPYECNECGKVFILKKSLILHQRFHTGENLYECKDCGKVFGSNRNLIDHERLHNGEKPYECRECGKTFIMSKSFMVHQKLHTQEKAYKCEDCGKAFSYNSSLLVHRRIHTGEKPFECSECGRAFSSNRNLIEHKRIHSGEKPYECDECGKCFILKKSLIGHQRIHTREKSYKCNDCGKVFSYRSNLIAHQRIHTGEKPYACSECGKGFTYNRNLIEHQRIHSGEKTYECHVCRKVLTSSRNLMVHQRIHTGEKPYKCNECGKDFSQNKNLVVHQRMHTGEKPYECDKCRKSFTSKRNLVGHQRIHTGEKPYGCNDCSKVFRQRKNLTVHQKIHTDEKPCECDVSEKEFSQTSNLHLQQKIHTIEEFSWLQNTNESKIEIQKI

SEQ ID NO: 16014 - protein, 426 aa, Homo sapiens
MAAVSPTTRCQESVTFEDVAVVFTDEEWSRLVPIQRDLYKEVMLENYNSIVSLGLPVPQPDVIFQLKRGDKPWMVDLHGSEEREWPESVSLDWETKPEIHDASDKKSEGSLRECLGRQSPLCPKFEVHTPNGRMGTEKQSPSGETRKKSLSRDKGLRRRRSALSREILTKERHQECSDCGKTFFDHSSLTRHQRTHTGEKPYDCRECGKAFSHRSSLSRHLMSHTGESPYECSVCSKAFFDRSSLTVHQRIHTGEKPFQCNECGKAFFDRSSLTRHQRIHTGESPYECHQCGKAFSQKSILTRHQLIHTGRKPYECNECGKAFYGVSSLNRHQKAHAGDPRYQCNECGKAFFDRSSLTQHQKIHTGDKPYECSECGKAFSQRCRLTRHQRVHTGEKPFECTVCGKVFSSKSSVIQHQRRYAKQGID

SEQ ID NO: 16015 - protein, 532 aa, Homo sapiens
MMFQDSVAFEDVAVSFTQEEWALLDPSQKNLYRDVMQETFKNLTSVGKTWKVQNIEDEYKNPRRNLSLMREKLCESKESHHCGESFNQIADDMLNRKTLPGITPCESSVCGEVGTGHSSLNTHIRADTGHKSSEYQEYGENPYRNKECKKAFSYLDSFQSHDKACTKEKPYDGKECTETFISHSCIQRHRVMHSGDGPYKCKFCGKAFYFLNLCLIHERIHTGVKPYKCKQCGKAFTRSTTLPVHERTHTGVNADECKECGNAFSFPSEIRRHKRSHTGEKPYECKQCGKVFISFSSIQYHKMTHTGEKPYECKQCGKAFRCGSHLQKHGRTHTGEKPYECRQCGKAFRCTSDLQRHEKTHTEDKPYGCKQCGKGFRCASQLQIHERTHSGEKPHECKECGKVFKYFSSLRIHERTHTGEKPHECKQCGKAFRYFSSLHIHERTHTGDKPYECKVCGKAFTCSSSIRYHERTHTGEKPYECKHCGKAFISNYIRYHERTHTGEKPYQCKQCGKAFIRASSCREHERTHTINR

SEQ ID NO: 16016 - protein, 390 aa, Homo sapiens; identical to SEQ ID NO: 15978

SEQ ID NO: 16017 - protein, 395 aa, Homo sapiens
MMAAKVVPMPPKPKQSFILRVPPDSKLGQDLLRDATNGPKTIHQLVLEHFLTFLPKPSLVQPSQKVKETLVIMKDVSSSLQNRVHPRPLVKLLPKGVQKEQETVSLYLKANPEELVVFEDLNVFHCQEECVSLDPTQQLTSEKEDDSSVGEMMLLAVNGSNPEGEDPEREPVENEDYREKSSDDDEMDSSLVSQQPPDNQEKERLNTSIPQKRKMRNLLVTIENDTPLEELSKYVDISIIALTRNRRTRRWYTCPLCGKQFNESSYLISHQRTHTGEKPYDCNHCGKSFNHKTNLNKHERIHTGEKPYSCSQCGKNFRQNSHRSRHEGIHIREKIFKCPECGKTFPKNEEFVLHLQSHEAERPYGCKKCGRRFGRLSNCTRHEKTHSACKTRKQK

SEQ ID NO: 16018 - protein, 648 aa, Homo sapiens
MATAVEPEDQDLWEEEGILMVKLEDDFTCRPESVLQRDDPVLETSHQNFRRFRYQEAASPREALIRLRELCHQWLRPERRTKEQILELLVLEQFLTVLPGELQSWVRGQRPESGEEAVTLVEGLQKQPRRPRRWVTVHVHGQEVLSEETVHLGVEPESPNELQDPVQSSTPEQSPEETTQSPDLGAPAEQRPHQEEELQTLQESEVPVPEDPDLPAERSSGDSEMVALLTALSQGLVTFKDVAVCFSQDQWSDLDPTQKEFYGEYVLEEDCGIVVSLSFPIPRPDEISQVREEEPWVPDIQEPQETQEPEILSFTYTGDRSKDEEECLEQEDLSLEDIHRPVLGEPEIHQTPDWEIVFEDNPGRLNERRFGTNISQVNSFVNLRETTPVHPLLGRHHDCSVCGKSFTCNSHLVRHLRTHTGEKPYKCMECGKSYTRSSHLARHQKVHKMNAPYKYPLNRKNLEETSPVTQAERTPSVEKPYRCDDCGKHFRWTSDLVRHQRTHTGEKPFFCTICGKSFSQKSVLTTHQRIHLGGKPYLCGECGEDFSEHRRYLAHRKTHAAEELYLCSECGRCFTHSAAFAKHLRGHASVRPCRCNECGKSFSRRDHLVRHQRTHTGEKPFTCPTCGKSFSRGYHLIRHQRTHSEKTS

SEQ ID NO: 16019 - protein, 554 aa, Homo sapiens
MSADGGGIQDTQDKETPPEVPDRGHPHQEMPSKLGEAVPSGDTQESLHIKMEPEEPHSEGASQEDGAQGAWGWAPLSHGSKEKALFLPGGALPSPRIPVLSREGRTRDRQMAAALLTAWSQMPVTFEDVALYLSREEWGRLDHTQQNFYRDVLQKKNGLSLGFPFSRPFWAPQAHGKGEASGSSRQAGDEKEWRGACTGAVEVGQRVQTSSVAALGNVKPFRTRAGRVQWGVPQCAQEAACGRSSGPAKDSGQPAEPDRTPDAAPPDPSPTEPQEYRVPEKPNEEEKGAPESGEEGLAPDSEVGRKSYRCEQCGKGFSWHSHLVTHRRTHTGEKPYACTDCGKRFGRSSHLIQHQIIHTGEKPYTCPACRKSFSHHSTLIQHQRIHTGEKPYVCDRCAKRFTRRSDLVTHQGTHTGAKPHKCPICAKCFTQSSALVTHQRTHTGVKPYPCPECGKCFSQRSNLIAHNRTHTGEKPYHCLDCGKSFSHSSHLTAHQRTHRGVRPYACPLCGKSFSRRSNLHRHEKIHTTGPKALAMLMLGAAAAGALATPPPAPT

SEQ ID NO: 16020 - protein, 478 aa, Homo sapiens; identical to SEQ ID NO: 14396

SEQ ID NO: 16021 - protein, 1280 aa, Homo sapiens
MGSLTFRDVAIEFSLEEWQCLDTAQQNLYRNVMLENYRNLVFLGIAAFKPDLIIFLEEGKESWNMKRHEMVEESPVICSHFAQDLWPEQGIEDSFQKVILRRYEKCGHENLHLKIGYTNVDECKVHKEGYNKLNQSLTTTQSKVFQRGKYANVFHKCSNSNRHKIRHTGKKHLQCKEYVRSFCMLSHLSQHKRIYTRENSYKCEEGGKAFNWSSTLTYYKSAHTGEKPYRCKECGKAFSKFSILTKHKVIHTGEKSYKCEECGKAFNQSAILTKHKIIHTGEKPNKCEECGKAFSKVSTLTTHKAIHAGEKPYKCKECGKAFSKVSTLITHKAIHAGEKPYKCKECGKAFSKFSILTKHKVIHTGEKPYKCEECGKAYKWPSTLSYHKKIHTGEKPYKCEECGKGFSMFSILTKHEVIHTGEKPYKCEECGKAFNWSSNLMEHKKIHTGETPYKCEECGKGFSMFSILTKHKVIHNGEKPYKCEECDKATHAGEKPYKCEECGKAFNWSSNLMEHKRIHTGEKPYKCEECGKSFSTFSILTKHKVIHTGEKPYKCEECGKAYKWSSTLSYHKKIHTVEKPYKCEECGKAFNQSAILIKHKRIHTGEKPYKCEECGKTFSKVSTLTTHKAIHAGEKPYKCKECGKTFIKVSTLTTHKAIHAGEKPYKCKECGKAFSKFSILTKHKVIHTGEKPYKCEECGKAFNWSSNLMEHKRIHTGEKPYKCEECGKSFSTFSVLTKHKVIHTGEKPYKCEECGKAYKWSSTLSYHKKIHTVEKPYKCEECGKAFNRSAILIKHKRIHTDEKPYKCEECGKTFSKVSTLTTHKAIHAGEKPYKCKECGKAFSKFSILTKHKVIHTGEKPYKCEECGKAYKWPSTLSYHKKIHTGEKPYKCEECGKGFSMFSILTKHEVIHTGEKPYKCEECGKAFSWLSVFSKHKKTHAGEKFYKCEACGKAYKSSSTLSYHKKIHTEEKPYKYEECGKGFSTFSILTKHKVIHTGEKPYKCEECGKAFNWSSNLMEHKKIHTGETPYKCEECDKAFSWPSSLTEHKATHAGEKPYKCEECGKAFSWPSRLTEHKATHAGEEPYKCEECGKAFNWSSNLMEHKRIHTGEKPYKCEECGKSFSTFSILTKHKVIHTGEKPYKCEECGKAYKWSSTLSYHKKIHTVEKPYKCEECGKGFVMFSILAKHKVIHTGEKLYKCEECGKAYKWPSTLRYHKKIHTGEKPYKCEECGKAFSTFSILTKHKVIHTGEKPYKCEECGKAFSWLSVFSKHKKIHTGEKL

SEQ ID NO: 16022 - protein, 564 aa, Homo sapiens
MLGFPPGRPQLPVQLRPQTRMATALRDPASGSVTFEDVAVYFSWEEWDLLDEAQKHLYFDVMLENFALTSSLGCWCGVEHEETPSEQRISGERVPQFRTSKEGSSSQNADSCEICCLVLRDILHLAEHQGTNCGQKLHTCGKQFYISANLQQHQRQHITEAPFRSYVDTASFTQSCIVHVSEKPFTCREIRKDFLANMRFLHQDATQTGEKPNNSNKCAVAFYSGKSHHNWGKCSKAFSHIDTLVQDQRILTREGLFECSKCGKACTRRCNLIQHQKVHSEERPYECNECGKFFTYYSSFIIHQRVHTGERPYACPECGKSFSQIYSLNSHRKVHTGERPYECGECGKSFSQRSNLMQHRRVHTGERPYECSECGKSFSQNFSLIYHQRVHTGERPHECNECGKSFSRSSSLIHHRRLHTGERPYECSKCGKSFKQSSSFSSHRKVHTGERPYVCGECGKSFSHSSNLKNHQRVHTGERPVECSECSKSFSCKSNLIKHLRVHTGERPYECSECGKSFSQSSSLIQHRRVHTGKRPYQCSQCGKSFGCKSVLIQHQRVHIGEKP

SEQ ID NO: 16023 - protein, 495 aa, Homo sapiens
MAESAPARHRRKRRSTPLTSSTLPSQATEKSSYFQTTEISLWTVVAAIQAVEKKMESQAARLQSLEGRTGTAEKKLADCEKMAVEFGNQLEGKWAVLGTLLQEYGLLQRRLENVENLLRNRNFWILRLPPGSKGEAPKVSRSLENDGVCFTEQEWENLEDWQKELYRNVMESNYETLVSLKVLGQTEGEAELGTEMLGDLEEEGPGGAHPAGGVMIKQELQYTQEGPADLPGEFSCIAEEQAFLSPEQTELWGGQGSSVLLETGPGDSTLEEPVGSRVPSSSRTVGCPKQKSHRQVQLDQECGQGLKLKKDTSRPYECSECEITFRYKQQLATHLRSHSGWGSCTPEEPEESLRPRPRLKPQTKKAKLHQCDVCLRSFSCKVSLVTHQRCHLQEGPSAGQHVQERFSPNSLVALPGHIPWRKSRSSLICGYCGKSFSHPSDLVRHQRIHTGERPYSCTECEKSFVQKQHLLQHQKIHQRERGGLALEPGRPNGLL

SEQ ID NO: 16024 - protein, 459 aa, Homo sapiens
MAAPLEAQDQAPGEGEGLLIVKVEDSSWEQESAQHEDGRDSEACRQRFRQFCYGDVHGPHEAFSQLWELCCRWLRPELRTKEQILELLVLEQFLTVLPGEIQGWVREQHPGSGEEAVALVEDLQKQPVKAWRQDVPSEEAEPEAAGRGSQATGPPPTVGARRRPSVPQEQHSHSAQPPALLKEGRPGETTDTCFVSGVHGPVALGDIPFYFSREEWGTLDPAQRDLFWDIKRENSRNTTLGFGLKGQSEKSLLQEMVPVVPGQTGSDVTVSWSPEEAEAWESENRPRAALGPVVGARRGRPPTRRRQFRDLAAEKPHSCGQCGKRFRWGSDLARHQRTHTGEKPHKCPECDKSFRSSSDLVRHQGVHTGEKPFSCSECGKSFSRSAYLADHQRIHTGEKPFGCSDCGKSFSLRSYLLDHRRVHTGERPFGCGECDKSFKQRAHLIAHQSLHAKMAQPVG

SEQ ID NO: 16025 - protein, 606 aa, Homo sapiens
MAVTFEDVTIIFTWEEWKFLDSSQKRLYREVMWENYTNVMSVENWNESYKSQEEKFRYLEYENFSYWQGWWNAGAQMYENQNYGETVQGTDSKDLTQQDRSQCQEWLILSTQVPGYGNYELTFESKSLRNLKYKNFMPWQSLETKTTQDYGREIYMSGSHGFQGGRYRLGISRKNLSMEKEQKLIVQHSYIPVEEALPQYVGVICQEDLLRDSMEEKYCGCNKCKGIYYWNSRCVFHKRNQPGENLCQCSICKACFSQRSDLYRHPRNHIGKKLYGCDEVDGNFHQSSGVHFHQRVHIGEVPYSCNACGKSFSQISSLHNHQRVHTEEKFYKIECDKDLSRNSLLHIHQRLHIGEKPFKCNQCGKSFNRSSVLHVHQRVHTGEKPYKCDECGKGFSQSSNLRIHQLVHTGEKSYKCEDCGKGFTQRSNLQIHQRVHTGEKPYKCDDCGKDFSHSSDLRIHQRVHTGEKPYTCPECGKGFSKSSKLHTHQRVHTGEKPYKCEECGKGFSQRSHLLIHQRVHTGEKPYKCHDCGKGFSHSSNLHIHQRVHTGEKPYQCAKCGKGFSHSSALRIHQRVHAGEKPYKCREYYKGFDHNSHLHNNHRRGNL

SEQ ID NO: 16026 - protein, 517 aa, Homo sapiens
MQPLSKLMAISKPRNLSLREQREVLRADMSWQQETNPVVETHDSEASRQKFRHFQYLKVSGPHEALSQLWELCLQWLRPEIHTKKQIIELLVLEQFLAILPEEVRTWVNLQHPNNSKDMVTLIEDVIEMLEDEDMPCKDSALQMGSIKEKMKAGSRTGKPQEPVTFKDVVVEFSKEEWGQLDSAVKNLYRNVMLENFRNLNSLRKAHLLSKPFESLKLESKKKRWIMEKEIPRKTIFDMKSISGEESSHGVIMTRLTESGHPSSDAWKGENWLYRNQKKWDINLPQEAFIPETIYTEEEDFECSENKKSFDINSVSSICAIQVGIPSRKGSPKCDKFKTYFKFNLDSVGKQHSEYEYGNDLSLSTDIRHQKSHTTMNSYECYQCGKAFCRSSSLIRHQIIHTGEKPYKCSECGRFFNRRTNLTKHQKLHAEAKACTSNKCGKAFSKSEDSNNPTLHFGNNFYQCVNCGKSFNRSSSLIRHQMIHTGEKPFKCKECSKAFNRSSNLVKHQKLHTRDKS

SEQ ID NO: 16027 - protein, 1048 aa, Homo sapiens
MQSKVTGNMPTQSLLMYMDGPEVIGSSLGSPMEMEDALSMKGTAVVPFRATQEKNVIQIEGYMPLDCMFCSQTFTHSEDLNKHVLMQHRPTLCEPAVLRVEAEYLSPLDKSQVRTEPPKEKNCKENEFSCEVCGQTFRVAFDVEIHMRTHKDSFTYGCNMCGRRFKEPWFLKNHMRTHNGKSGARSKLQQGLESSPATINEVVQVHAAESISSPYKICMVCGFLFPNKESLIEHRKVHTKKTAFGTSSAQTDSPQGGMPSSREDFLQLFNLRPKSHPETGKKPVRCIPQLDPFTTFQAWQLATKGKVAICQEVKESGQEGSTDNDDSSSEKELGETNKGSCAGLSQEKEKCKHSHGEAPSVDADPKLPSSKEKPTHCSECGKAFRTYHQLVLHSRVHKKDRRAGAESPTMSVDGRQPGTCSPDLAAPLDENGAVDRGEGGSEDGSEDGLPEGIHLDKNDDGGKIKHLTSSRECSYCGKFFRSNYYLNIHLRTHTGEKPYKCEFCEYAAAQKTSLRYHLERHHKEKQTDVAAEVKNDGKNQDTEDALLTADSAQTKNLKRFFDGAKDVTGSPPAKQLKEMPSVFQNVLGSAVLSPAHKDTQDFHKNAADDSADKVNKNPTPAYLDLLKKRSAVETQANNLICRTKADVTPPPDGSTTHNLEVSPKEKQTETAADCRYRPSVDCHEKPLNLSVGALHNCPAISLSKSLIPSITCPFCTFKTFYPEVLMMHQRLEHKYNPDVHKNCRNKSLLRSRRTGCPPALLGKDVPPLSSFCKPKPKSAFPAQSKSLPSAKGKQSPPGPGKAPLTSGIDSSTLAPSNLKSHRPQQNVGVQGAATRQQQSEMFPKTSVSPAPDKTKRPETKLKPLPVAPSQPTLGSSNINGSIDYPAKNDSPWAPPGRDYFCNRSASNTAAEFGEPLPKRLKSSVVALDVDQPGANYRRGYDLPKYHMVRGITSLLPQDCVYPSQALPPKPRFLSSSEVDSPNVLTVQKPYGGSGPLYTCVPAGSPASSSTLEGKRPVSYQHLSNSMAQKRNYENFIGNAHYRPNDKKT

SEQ ID NO: 16028 - protein, 722 aa, Homo sapiens
MEGSRPRAPSGHLAPSPPAFDGELDLQRYSNGPAVSAGSLGMGAVSWSESRAGERRFPCPVCGKRFRFNSILALHLRAHPGAQAFQCPHCGHRAAQRALLRSHLRTHQPERPRSPAARLLLELEERALLREARLGRARSSGGMQATPATEGLARPQAPSSSAFRCPYCKGKFRTSAERERHLHILHRPWKCGLCSFGSSQEEELLHHSLTAHGAPERPLAATSAAPPPQPQPQPPPQPEPRSVPQPEPEPEPEREATPTPAPAAPEEPPAPPEFRCQVCGQSFTQSWFLKGHMRKHKASFDHACPVCGRCFKEPWFLKNHMKVHASKLGPLRAPGPASGPARAPQPPDLGLLAYEPLGPALLLAPAPTPAERREPPSLLGYLSLRAGEGRPNGEGAEPGPGRSFGGFRPLSSALPARARRHRAEEPEEEEEVVEAEEETWARGRSLGSLASLHPRPGEGPGHSASAAGAQARSTATQEENGLLVGGTRPEGGRGATGKDCPFCGKSFRSAHHLKVHLRVHTGERPYKCPHCDYAGTQSGSLKYHLQRHHREQRSGAGPGPPPEPPPPSQRGSAPQSGAKPSPQPATWVEGASSPRPPSSGAGPGSRRKPASPGRTLRNGRGGEAEPLDLSLRAGPGGEAGPGGALHRCLFCPFATGAPELMALHLQVHHSRRARGRRPPQADASPPYARVPSGETPPSPSQEGEEGSGLSRPGEAGLGGQER

SEQ ID NO: 16029 - protein, 224 aa, Homo sapiens
MRLAKPKAGISRSSSQGKAYENKRKTGRQRQKWGMTIRFDSSFSRLRRSLDDKPYKCTECEKSFSQSSTLFQHQKIHTGKKSHKCADCGKSFFQSSNLIQHRRIHTGEKPYKCDECGESFKQSSNLIQHQRIHTGEKPYQCDECGRCFSQSSHLIQHQRTHTGEKPYQCSECGKCFSQSSHLRQHMKVHKEEKPRKTRGKNIRVKTHLPSWKAGTGRKSVAGLR

SEQ ID NO: 16030 - protein, 617 aa, Homo sapiens
MISPSLELLHSGLCKFPEVEGKMTTFKEAVTFKDVAVVFTEEELGLLDPAQRKLYRDVMLENFRNLLSVGNQPFHQDTFHFLGKEKFWKMKTTSQREGNSGGKIQIEMETVPEAGPHEEWSCQQIWEQIASDLTRSQNSIRNSSQFFKEGDVPCQIEARLSISHVQQKPYRCNECKQSFSDVSVFDLHQQSHSGEKSHTCGECGKSFCYSPALHIHQRVHMGEKCYKCDVCGKEFNQSSHLQTHQRVHTGEKPFKCGQCGKGFHSRSALNVHCKLHTGEKPYNCEECGKAFIHDSQLQEHQRIHTGEKPFKCDICGKSFRVRSRLNRHSMVHTGEKPFRCDTCGKNFRQRSALNSHSMVHIEEKPYKCEQCGKGFICRRDFCKHQMVHTGEKPYNCKECGKTFRWSSCLLNHQQVHSGQKSFKCEECGKGFYTNSRRSSHQRSHNGEKPYNCEECGKDYKRRLDLEFHQRVHTGERPYNCKECGKSFGWASCLLKHQRLHSGEKPFKCEECGKRFTQSSQLHSHQTCHTGEKLYKCEQCEKGYNSKFNLDMHQRVHGGERPYNCKECGKSFGWASCLLKHQRLHSGEKPLKSGVWEEIYSEFTASFTSVSLCGRKAI

SEQ ID NO: 16031 - protein, 482 aa, Homo sapiens
MTMSKEAVTFKDVAVVFTEEELGLLDLAQRKLYRDVMLENFRNLLSVGHQPFHRDTFHFLREEKFWMMDIATQREGNSGGKIQPEMKTFPEAGPHEGWSCQQIWEEIASDLTRPQDSTIKSSQFFEQGDAHSQVEEGLSIMHTGQKPSNCGKCKQSFSDMSIFDLPQQIRSAEKSHSCDECGKSFCYISALHIHQRVHLGEKLFKCDVCGKEFSQSLHLQTHQRVHTGEKPFKCEQCGRGFRCRSALTVHCKLHMGEKHYNCEACGRAFIHDFQLQKHQRIHTGEKPFKCEICSVSFRLRSSLNRHCVVHTGKKPNSTGEYGKGFIRRLDLCKHQTIHTGEKPYNCKECGKSFRRSSYLLIHQRVHTGEKPYKCDKCGKSYITKSGLDLHHRAHTGERPYNCDDCGKSFRQASSILNHKRLHCRKKPFKCEDCGKKLVYRSYRKDQQKNHSGENPSKCEDCGKRYKRRLNLDIILSLFLNDT

SEQ ID NO: 16032 - protein, 707 aa, Homo sapiens
MTTFKEAMTFKDVAVVFTEEELGLLDLAQRKLYRDVMLENFRNLLSVGHQAFHRDTFHFLREEKIWMMKTAIQREGNSGDKIQTEMETVSEAGTHQEWSFQQIWEKIASDLTRSQDLMINSSQFSKEGDFPCQTEAGLSVIHTRQKSSQGNGYKPSFSDVSHFDFHQQLHSGEKSHTCDECGKNFCYISALRIHQRVHMGEKCYKCDVCGKEFSQSSHLQTHQRVHTGEKPFKCVECGKGFSRRSALNVHHKLHTGEKPYNCEECGKAFIHDSQLQEHQRIHTGEKPFKCDICGKSFCGRSRLNRHSMVHTAEKPFRCDTCDKSFRQRSALNSHRMIHTGEKPYKCEECGKGFICRRDLYTHHMVHTGEKPYNCKECGKSFRWASCLLKHQRVHSGEKPFKCEECGKGFYTNSQCYSHQRSHSGEKPYKCVECGKGYKRRLDLDFHQRVHTGEKLYNCKECGKSFSRAPCLLKHERLHSGEKPFQCEECGKRFTQNSHLHSHQRVHTGEKPYKCEKCGKGYNSKFNLDMHQKVHTGERPYNCKECGKSFGWASCLLKHQRLHSGEKPFKCEECGKRFTQNSQLHSHQRVHTGEKPYKCDECGKGFSWSSTRLTHQRRHSRETPLKCEQHGKNIVQNSFSKVQEKVHSVEKPYKCEDCGKGYNRRLNLDMHQRVHMGEKTWKCRECDMCFSQASSLRLHQNVHVGEKP

SEQ ID NO: 16033 - protein, 543 aa, Homo sapiens
MAAAKAEMQLMSPLQISDPFGSFPHSPTMDNYPKLEEMMLLSNGAPQFLGAAGAPEGSGSNSSSSSSGGGGGGGGGSNSSSSSSTFNPQADTGEQPYEHLTAESFPDISLNNEKVLVETSYPSQTTRLPPITYTGRFSLEPAPNSGNTLWPEPLFSLVSGLVSMTNPPASSSSAPSPAASSASASQSPPLSCAVPSNDSSPIYSAAPTFPTPNTDIFPEPQSQAFPGSAGTALQYPPPAYPAAKGGFQVPMIPDYLFPQQQGDLGLGTPDQKPFQGLESRTQQPSLTPLSTIKAFATQSGSQDLKALNTSYQSQLIKPSRMRKYPNRPSKTPPHERPYACPVESCDRRFSRSDELTRHIRIHTGQKPFQCRICMRNFSRSDHLTTHIRTHTGEKPFACDICGRKFARSDERKRHTKIHLRQKDKKADKSVVASSATSSLSSYPSPVATSYPSPVTTSYPSPATTSYPSPVPTSFSSPGSSTYPSPVHSGFPSPSVATTYSSVPPAFPAQVSSFPSSAVTNSFSASTGLSDMTATFSPRTIEIC

SEQ ID NO: 16034 - protein, 706 aa, Homo sapiens; identical to SEQ ID NO: 14917

SEQ ID NO: 16035 - protein, 803 aa, Homo sapiens
MNMFKEAVTFKDVAVAFTEEELGLLGPAQRKLYRDVMVENFRNLLSVGHPPFKQDVSPIERNEQLWIMTTATRRQGNLGEKNQSKLITVQDRESEEELSCWQIWQQIANDLTRCQDSMINNSQCHKQGDFPYQVGTELSIQISEDENYIVNKADGPNNTGNPEFPILRTQDSWRKTFLTESQRLNRDQQISIKNKLCQCKKGVDPIGWISHHDGHRVHKSEKSYRPNDYEKDNMKILTFDHNSMIHTGQKSYQCNECKKPFSDLSSFDLHQQLQSGEKSLTCVERGKGFCYSPVLPVHQKVHVGEKLKCDECGKEFSQGAHLQTHQKVHVIEKPYKCKQCGKGFSRRSALNVHCKVHTAEKPYNCEECGRAFSQASHLQDHQRLHTGEKPFKCDACGKSFSRNSHLQSHQRVHTGEKPYKCEECGKGFICSSNLYIHQRVHTGEKPYKCEECGKGFSRPSSLQAHQGVHTGEKSYICTVCGKGFTLSSNLQAHQRVHTGEKPYKCNECGKSFRRNSHYQVHLVVHTGEKPYKCEICGKGFSQSSYLQIHQKAHSIEKPFKCEECGQGFNQSSRLQIHQLIHTGEKPYKCEECGKGFSRRADLKIHCRIHTGEKPYNCEECGKVFRQASNLLAHQRVHSGEKPFKCEECGKSFGRSAHLQAHQKVHTGDKPYKCDECGKGFKWSLNLDMHQRVHTGEKPYKCGECGKYFSQASSLQLHQSVHTGEKPYKCDVCGKVFSRSSQLQSHQRVHTGEKPYKCEICGKSFSWRSNLTVHHRIHVGDKSYKSNRGGKNIRESTQEKKSIK

SEQ ID NO: 16036 - protein, 799 aa, Homo sapiens
MPSQNYDLPQKKQEKMTKFQEAVTFKDVAVVFSREELRLLDLTQRKLYRDVMVENFKNLVAVGHLPFQPDMVSQLEAEEKLWMMETETQRSSKHQNKMETLQKFALKYLSNQELSCWQIWKQVASELTRCLQGKSSQLLQGDSIQVSENENNIMNPKGDSSIYIENQEFPFWRTQHSCGNTYLSESQIQSRGKQIDVKNNLQIHEDFMKKSPFHEHIKTDTEPKPCKGNEYGKIISDGSNQKLPLGEKPHPCGECGRGFSYSPRLPLHPNVHTGEKCFSQSSHLRTHQRIHPGEKLNRCHESGDCFNKSSFHSYQSNHTGEKSYRCDSCGKGFSSSTGLIIHYRTHTGEKPYKCEECGKCFSQSSNFQCHQRVHTEEKPYKCEECGKGFGWSVNLRVHQRVHRGEKPYKCEECGKGFTQAAHFHIHQRVHTGEKPYKCDVCGKGFSHNSPLICHRRVHTGEKPYKCEACGKGFTRNTDLHIHFRVHTGEKPYKCKECGKGFSQASNLQVHQNVHTGEKRFKCETCGKGFSQSSKLQTHQRVHTGEKPYRCDVCGKDFSYSSNLKLHQVIHTGEKPYKCEECGKGFSWRSNLHAHQRVHSGEKPYKCEQCDKSFSQAIDFRVHQRVHTGEKPYKCGVCGKGFSQSSGLQSHQRVHTGEKPYKCDVCGKGFRYSSQFIYHQRGHTGEKPYKCEECGKGFGRSLNLRHHQRVHTGEKPHICEECGKAFSLPSNLRVHLGVHTREKLFKCEECGKGFSQSARLEAHQRVHTGEKPYKCDICDKDFRHRSRLTYHQKVHTGKKL

SEQ ID NO: 16037 - protein, 825 aa, Homo sapiens
METLTSRHEKRALHSQASAISQDREEKIMSQEPLSFKDVAVVFTEEELELLDSTQRQLYQDVMQENFRNLLSVGERNPLGDKNGKDTEYIQDEELRFFSHKELSSCKIWEEVAGELPGSQDCRVNLQGKDFQFSEDAAPHQGWEGASTPCFPIENSLDSLQGDGLIGLENQQFPAWRAIRPIPIQGSWAKAFVNQLGDVQERCKNLDTEDTVYKCNWDDDSFCWISCHVDHRFPEIDKPCGCNKCRKDCIKNSVLHRINPGENGLKSNEYRNGFRDDADLPPHPRVPLKEKLCQYDEFSEGLRHSAHLNRHQRVPTGEKSVKSLERGRGVRQNTHIRNHPRAPVGDMPYRCDVCGKGFRYKSVLLIHQGVHTGRRPYKCEECGKAFGRSSNLLVHQRVHTGEKPYKCSECGKGFSYSSVLQVHQRLHTGEKPYTCSECGKGFCAKSALHKHQHIHPGEKPYSCGECGKGFSCSSHLSSHQKTHTGERPYQCDKCGKGFSHNSYLQAHQRVHMGQHLYKCNVCGKSFSYSSGLLMHQRLHTGEKPYKCECGKSFGRSSDLHIHQRVHTGEKPYKCSECGKGFRRNSDLHSHQRVHTGERPYVCDVCGKGFIYSSDLLIHQRVHTGEKPYKCAECGKGFSYSSGLLIHQRVHTGEKPYRCQECGKGFRCTSSLHKHQRVHTGKKPYTCDQCGKGFSYGSNLRTHQRLHTGEKPYTCCECGKGFRYGSGLLSHKRVHTGEKPYRCHVCGKGYSQSSHLQGHQRVHTGEKPYKCEECGKGFGRNSCLHVHQRVHTGEKPYTCGVCGKGFSYTSGLRNHQRVHLGENPYK

SEQ ID NO: 16038 - protein, 643 aa, Homo sapiens
MLENYGNVASLGFPLLKPAVISQLEGGSELGGSSPLAAGTGLQGLQTDIQTDNDLTKEMYEGKENVSFELQRDFSQETDFSEASLLEKQQEVHSAGNIKKEKSNTIDGTVKDETSPVEECFFSQSSNSYQCHTITGEQPSGCTGLGKSISFDTKLVKHEIINSEERPFKCEELVEPFRCDSQLIQHQENNTEEKPYQCSECGKAFSINEKLIWHQRLHSGEKPFKCVECGKSFSYSSHYITHQTIHSGEKPYQCKMCGKAFSVNGSLSRHQRIHTGEKPYQCKECGNGFSCSSAYITHQRVHTGEKPYECNDCGKAFNVNAKLIQHQRIHTGEKPYECNECGKGFRCSSQLRQHQSIHTGEKPYQCKECGKGFNNNTKLIQHQRIHTGEKPYECTECGKAFSVKGKLIQHQRIHTGEKPYECNECGKAFRCNSQFRQHLRIHTGEKPYECNECGKAFSVNGKLMRHQRIHTGEKPFECNECGRCFTSKRNLLDHHRIHTGEKPYQCKECGKAFSINAKLTRHQRIHTGEKPFKCMECEKAFSCSSNYIVHQRIHTGEKPFQCKECGKAFHVNAHLIRHQRSHTGEKPFRCVECGKGFSFSSDYIIHQTVHTWKKPYMCSVCGKAFRFSFQLSQHQSVHSEGKS

SEQ ID NO: 16039 - protein, 230 aa, Homo sapiens
MGQQISDQTQLVINKLPEKVAKHVTLVRESGSLTYEEFLGRVAELNDVTAKVASGQEKHLLFEVQPGSDSSAFWKVVVRVVCTKINKSSGIVEASRIMNLYQFIQLYKDITSQAAGVLAQSSTSEEPDENSSSVTSCQASLWMGRVKQLTDEEECCICMDGRADLILPCAHSFCQKCIDKWSDRHRNCPICRLQMTGANESWVVSDAPTEDDMANYILNMADEAGQPHRP

SEQ ID NO: 16040 - protein, 474 aa, Homo sapiens
MTTFKEAVTFKDVAVFFTEEELGLLDPAQRKLYQDVMLENFTNLLSVGHQPFHPFHFLREEKFWMMETATQREGNSGGKTIAEAGPHEDCPCQQIWEQTASDLTQSQDSIINNSHFFEQGDVPSQVEAGLSIIHTGQKPSQNGKCKQSFSDVAIFDPPQQFHSGEKSHTCNECGKSFCYISALRIHQRVHLREKLSKCDMRGKEFSQSSCLQTRERVHTGEKPFKCEQCGKGFRCRAILQVHCKLHTGEKPYICEKCGRAFIHDFQLQKHQIIHTGEKPFKCEICGKSFCLRSSLNRHCMVHTAEKLYKSEECGKGFTDSLDLHKHQIIHTGQKPYNCKECGKSFRWSSYLLIHQRIHSGEKPYRCEECGKGYISKSGLNLHQRVHTGERPYNCKECGKSFSRASSILNHKKLHCRKKPFKCEDCGKRLVHRSFCKDQQGDHNGENSSKCEDCGKRYKRRLNLDIILSLFLNDM

SEQ ID NO: 16041 - protein, 417 aa, Homo sapiens
MAVSLTAAETLALQGTQGQEKMMMMGPKEEEQSCEYETRLPGNHSTSQEIFRQRFRHLRYQETPGPREALSQLRVLCCEWLRPEKHTKEQILEFLVLEQFLTILPEELQSWVRGHHPKSGEEAVTVLEDLEKGLEPEPQVPGPAHGPAQEEPWEKKESLGAAQEALSIQLQPKETQPFPKSEQVYLHFLSVVTEDGPEPKDKGSLPQPPITEVESQVFSEKLATDTSTFEATSEGTLELQQRNPKAERLRWSPAQEESFRQMVVIHKEIPTGKKDHECSECGKTFIYNSHLVVHQRVHSGEKPYKCSDCGKTFKQSSNLGQHQRIHTGEKPFECNECGKAFRWGAHLVQHQRIHSGEKPYECNECGKAFSQSSYLSQHRRIHSGEKPFICKECGKAYGWCSELIRHRRVHARKEPSH

SEQ ID NO: 16042 - protein, 670 aa, Homo sapiens
MTKFQEMVTFKDVAVVFTREELGLLDLAQRKLYQDVMLENFRNLLSVGYQPFKLDVILQLGKEDKLRMMETEIQGDGCSGHKNQNEIDTLQEVRLRFLSYEDLICWQIWEQFTSKLTSNQDLIINLQGKRSKLLKQGDSPCQVWTGESSQVSEDENYVIKLQGESSNSIKNQELPLRTTWDFWRKMYLREPQNYQSRCQQIDVKNKLCKCDHCVRQRIAHQHDDHGVHKREKAFSHNNCGKDCVKESSQHSIIQSGEQTSDENGKGLSVGSNLELHQQLHLRDKPHVNVEYGKGIGYSSGLPRHQCFHIGEKCYRNGDSGEGFSQGSHLQPHQRVSTGENLYRCQVYARSSNQNSCLPSHELTHPGEKLCTCGRCGKGFHHSLDFDIHCVDSAGERACKCDVYDKGFSQTSQLQAHQRGHSRDKTYKWEVSDRIFNRNSGLHQRVHTGEKPYKCEVCDKGFSKASNLQAHQRIHTGEKPYKCDVCDKNFSRNSHLQAHQRVHTGEKPYKCDTCGKDFSQISHLQAHQRVHKGEKPYKCETCGKGFSQSSHLQDHQQVHTGENPYKCDVCGKGFSWSSHLQAHQRVHTGEKPYKCEECRKGFIWNSYLHVHQRIHTGEKPYKCGMCGKSFSQTSHLQAHQRVHTGEKPYKCFVCGKGFSKSSLSSDSSESP

SEQ ID NO: 16043 - protein, 707 aa, Homo sapiens; identical to SEQ ID NO: 16032

SEQ ID NO: 16044 - protein, 700 aa, Homo sapiens
MTTFKEGLTFKDVAVVFTEEELGLLDPVQRNLYQDVMLENFRNLLSVGHHPFKHDVFLLEKEKKLDIMKTATQRKGKSADKIQSEVETVPEAGRHEELYWGQIWKQIASDLIKYEDSMISISRFPRQGDLSCQVRAGLYTTHTGQKFYQCDEYKKSFTDVFNFDLHQQLHSGEKSHTCDECGKSFCYISALHIHQRVHMGEKCYKCDVCGKEFSQSSHLQTHQRVHTVEKPFKCVECGKGFSRRSTLTVHCKLHSGEKPYNCEECGRAFIHASHLQEHQRIHTGEKPFKCDTCGKNFRRRSALNNHCMVHTGEKPYKCEDCGKCFTCSSNLRIHQRVHTGEKPYKCEECGKCFIQPSQFQAHRRIHTGEKPYVCKVCGKGFIYSSSFQAHQGVHTGEKPYKCNECGKSFRMKIHYQVHLVVHTGEKPYKCEVCGKAFRQSSYLKIHLKAHSVQKPFKCEECGQGFNQSSRLQIHQLIHTGEKPYKCEECGKGFSRRADLKIHCRIHTGEKPYNCEECGKVFSQASHLLTHQRVHSGEKPFKCEECGKSFSRSAHLQAHQKVHTGEKPYKCGECGKGFKWSLNLDMHQRVHTGEKPYTCGECGKHFSQASSLQLHQSVHTGEKPYKCDVCGKVFSRSSQLQYHRRVHTGEKPYKCEICGKRFSWRSNLVSHHKIHAAGTFYENDENSKNIRELSEGGSSTR

SEQ ID NO: 16045 - protein, 738 aa, Homo sapiens
MTKFQEAVTFKDVAVAFTEEELGLLDSAQRKLYRDVMLENFRNLVSVGHQSFKPDMISQLEREEKLWMKELQTQRGKHSGDRNQNEMATLHKAGLRCFSLGELSCWQIKRHIASKLARSQDSMINIEGKSSQFPKHHDSPCQVGAGESIQASVDDNCLVNHIGDHSSIIENQEFPTGKVPNSWSKIYLNETQNYQRSCKQTQMKNKLCIFAPYVDIFSCISHHHDDNIVHKRDKVHSNSDCGKDTLKVSPLTQRSIHTGQKTYQGNECEEAFNDSSSLELHKQVHLGKKSPACSTHEKDTSYSSGIPVQQSVRTGKKRYWCHECGKGFSQSSNLQTHQRVHTGEKPYTCHECGKSFNQSSHLYAHLPIHTGEKPYRCDSCGKGFSRSTDLNIHCRVHTGEKPYKCEVCGKGFTQRSHLQAHERIHTGEKPYKCGDCGKRFSCSSNLHTHQRVHTEEKPYKCDECGKCFSLSFNLHSHQRVHTGEKPYKCEECGKGFSSASSFQSHQRVHTGEKPFRCNVCGKGFSQSSYFQAHQRVHTGEKPYKCEVCGKRFNWSLNLHNHQRVHTGEKPYKCEECGKGFSQASNLQAHQSVHTGEKPFKCDACQKRFSQASHLQAHQRVHTGEKPYKCDTCGKAFSQRSNLQVHQIIHTGEKPFKCEECGKEFSWSAGLSAHQRVHTGEKPYTCQQCGKGFSQASHFHTHQRVHTGERPYICDVCCKGFSQRSHLIYHQRVHTGGNL

SEQ ID NO: 16046 - protein, 1845 aa, Homo sapiens
MGLCGLLERCWLHHDPDGVLTLNAENTNYAYQVPNFHKCEICLLSFPKESQFQRHMRDHERNDKPHRCDQCPQTFNVEFNLTLHKCTHSGEDPTCPVCNKKFSRVASLKAHIMLHEKEENLICSECGDEFTLQSQLAVHMEEHRQELAGTRQHACKACKKEFETSSELKEHMKTHYKIRVSSTRSYNRNIDRSGFTYSCPHCGKTFQKPSQLTRHIRIHTGERPFKCSECGKAFNQKGALQTHMIKHTGEKPHACAFCPAAFSQKGNLQSHVQRVHSEVKNGPTYNCTECSCVFKSLGSLNTHISKMHMGGPQNSTSSTETAHVLTATLFQTLPLQQTEAQATSASSQPSSQAVSDVIQQLLELSEPAPVESGQSPQPGQQLSITVGINQDILQQALENSGLSSIPAAAHPNDSCHAKTSAPHAQNPDVSSVSNEQTDPTDAEQEKEQESPEKLDKKEKKMIKKKSPFLPGSIREENGVRWHVCPYCAKEFRKPSDLVRHIRIHTHEKPFKCPQCFRAFAVKSTLTAHIKTHTGIKAFKCQYCMKSFSTSGSLKVHIRLHTGVRPFACPHCDKKFRTSGHRKTHIASHFKHTELRKMRHQRKPAKVRVGKTNIPVPDIPLQEPILITDLGLIQPIPKNQFFQSYFNNNFVNEADRPYKCFYCHRAYKKSCHLKQHIRSHTGEKPFKCSQCGRGFVSAGVLKAHIRTHTGLKSFKCLICNGAFTTGGSLRRHMGIHNDLRPYMCPYCQKTFKTSLNCKKHMKTHRYELAQQLQQHQQAASIDDSTVDQQSMQASTQMQVEIESDELPQTAEVVAANPEAMLDLEPQHVVGTEEAGLGQQLADQPLEADEDGFVAPQDPLRGHVDQFEEQSPAQQSFEPAGLPQGFTVTDTYHQQPQFPPVQQLQDSSTLESQALSTSFHQQSLLQAPSSDGMNVTTRLIQESSQEELDLQAQGSQFLEDNEDQSRRSYRCDYCNKGFKKSSHLKQHVRSHTGEKPYKCKLCGRGFVSSGVLKSHEKTHTGVKAFSCSVCNASFTTNGSLTRHMATHMSMKPYKCPFCEEGFRTTVHCKKHMKRHQTVPSAVSATGETEGGDICMEEEEEHSDRNASRKSRPEVITFTEEETAQLAKIRPQESATVSEKVLVQSAAEKDRISELRDKQAELQDEPKHANCCTYCPKSFKKPSDLVRHVRIHTGEKPYKCDECGKSFTVKSTLDCHVKTHTGQKLFSCHVCSNAFSTKGSLKVHMRLHTGAKPFKCPHCELRFRTSGRRKTHMQFHYKPDPKKARKPMTRSSSEGLQPVNLLNSSSTDPNVFIMNNSVLTGQFDQNLLQPGLVGQAILPASVSAGGDLTVSLTDGSLATLEGIQLQLAANLVGPNVQISGIDAASINNITLQIDPSILQQTLQQGNLLAQQLTGEPGLAPQNSSLQTSDSTVPASVVIQPISGLSLQPTVTSANLTIGPLSEQDSVLTTNSSGTQDLTQVMTSQGLVSPSGGPHEITLTINNSSLSQVLAQAAGPTATSSSGSPQEITLTISELNTTSGSLPSTTPMSPSAISTQNLVMSSSGVGGDASVTLTLADTQGMLSGGLDTVTLNITSQGQQFPALLTDPSLSGQGGAGSPQVILVSHTPQSASAACEEIAYQVAGVSGNLAPGNQPEKEGRAHQCLECDRAFSSAAVLMHHSKEVHGRERIHGCPVCRKAFKRATHLKEHMQTHQAGPSLSSQKPRVFKCDTCEKAFAKPSQLERHSRIHTGERPFHCTLCEKAFNQKSALQVHMKKHTGERPYKCAYCVMGFTQKSNMKLHMKRAHSYAGALQESAGHPEQDGEELSRTLHLEEVVQEAAGEWQALTHVF

SEQ ID NO: 16047 - protein, 458 aa, Homo sapiens
MASTITGSQDCIVNHRGEVDGEPELDISPCQQWGEASSPISRNRDSVMTLQSGCFENIESETYLPLKVSSQIDTQDSSVKFCKNEPQDHQESRRLFVMEESTERKVIKGESCSENLQVKLVSDGQELASPLLNGEATCQNGQLKESLDPIDCNCKDIHGWKSQVVSCSQQRAHTEEKPCDHNNCGKILNTSPDGHPYEKIHTAEKQYECSQCGKNFSQSSELLLHQRDHTEEKPYKCEQCGKGFTRSSSLLIHQAVHTDEKPYKCDKCGKGFTRSSSLLIHHAVHTGEKPYKCDKCGKGFSQSSKLHIHQRVHTGEKPYECEECGMSFSQRSNLHIHQRVHTGERPYKCGECGKGFSQSSNLHIHRCIHTGEKPYQCYECGKGFSQSSDLRIHLRVHTGEKPYHCGKCGKGFSQSSKLLIHQRVHTGEKPYECSKCGKGFSQSSNLHIHQRVHKKDPR

SEQ ID NO: 16048 - protein, 368 aa, Homo sapiens
MSAQSVEEDSILIIPTPDEEEKILRVKLEEDPDGEEGSSIPWNHLPDPEIFRQRFRQFGYQDSPGPREAVSQLRELCRLWLRPETHTKEQILELVVLEQFVAILPKELQTWVRDHHPENGEEAVTVLEDLESELDDPGQPVSLRRRKREVLVEDMVSQEEAQGLPSSELDAVENQLKWASWELHSLRHCDDDGRTENGALAPKQELPSALESHEVPGTLNMGVPQIFKYGETCFPKGRFERKRNPSRKKQHICDECGKHFSQGSALILHQRIHSGEKPYGCVECGKAFSRSSILVQHQRVHTGEKPYKCLECGKAFSQNSGLINHQRIHTGEKPYECVQCGKSYSQSSNLFRHQRRHNAEKLLNVVKV

SEQ ID NO: 16049 - protein, 579 aa, Homo sapiens
MNKSQEQVSFKDVCVDFTQEEWYLLDPAQKILYRDVILENYSNLVSVGYCITKPEVIFKIEQGEEPWILEKGFPSQCHPERKWKVDDVLESSQENEDDHFWELLFHNNKTVSVENGDRGSKTFNLGTDPVSLRNYPYKICDSCEMNLKNISGLIISKKNCSRKKPDEFNVCEKLLLDIRHEKIPIGEKSYKYDQKRNAINYHQDLSQPSFGQSFEYSKNGQGFHDEAAFFTNKRSQIGETVCKYNECGRTFIESLKLNISQRPHLEMEPYGCSICGKSFCMNLRFGHQRALTKDNPYEYNEYGEIFCDNSAFIIHQGAYTRKILREYKVSDKTWEKSALLKHQIVHMGGKSYDYNENGSNFSKKSHLTQLRRAHTGEKTFECGECGKTFWEKSNLTQHQRTHTGEKPYECTECGKAFCQKPHLTNHQRTHTGEKPYECKQCGKTFCVKSNLTEHQRTHTGEKPYECNACGKSFCHRSALTVHQRTHTGEKPFICNECGKSFCVKSNLIVHQRTHTGEKPYKCNECGKTFCEKSALTKHQRTHTGEKPYECNACGKTFSQRSVLTKHQRIHTRVKALSTS

SEQ ID NO: 16050 - protein, 456 aa, Homo sapiens
MNKFQGPVTLKDVIVEFTKEEWKLLTPAQRTLYKDVMLENYSHLVSVGYHVNKPNAVFKLKQGKEPWILEVEFPHRGFPEDLWSIHDLEARYQESQAGNSRNGELTKHQKTHTTEKACECKECGKFFCQKSALIVHQHTHSKGKSYDCDKCGKSFSKNEDLIRHQKIHTRDKTYECKECKKIFYHLSSLSRHLRTHAGEKPYECNQCEKSFYQKPHLTEHQKTHTGEKPFECTECGKFFYVKAYLMVHQKTHTGEKPYECKECGKAFSQKSHLTVHQRMHTGEKPYKCKECGKFFSRNSHLKTHQRSHTGEKPYECKECRKCFYQKSALTVHQRTHTGEKPFECNKCGKTFYYKSDLTKHQRKHTGEKPYECTECGKSFAVNSVLRLHQRTHTGEKPYACKECGKSFSQKSHFIIHQRKHTGEKPYECQECGETFIQKSQLTAHQKTHTKKRNAEK

SEQ ID NO: 16051 - protein, 560 aa, Homo sapiens
MAAARLLPVPAGPQPLSFQAKLTFEDVAVLLSQDEWDRLCPAQRGLYRNVMMETYGNVVSLGLPGSKPDIISQLERGEDPWVLDRKGAKKSQGLWSDYSDNLKYDHTTACTQQDSLSCPWECETKGESQNTDLSPKPLISEQTVILGKTPLGRIDQENNETKQSFCLSPNSVDHREVQVLSQSMPLTPHQAVPSGERPYMCVECGKCFGRSSHLLQHQRIHTGEKPYVCSVCGKAFSQSSVLSKHRRIHTGEKPYECNECGKAFRVSSDLAQHHKIHTGEKPHECLECRKAFTQLSHLIQHQRIHTGERPYVCPLCGKAFNHSTVLRSHQRVHTGEKPHRCNECGKTFSVKRTLLQHQRIHTGEKPYTCSECGKAFSDRSVLIQHHNVHTGEKPYECSECGKTFSHRSTLMNHERIHTEEKPYACYECGKAFVQHSHLIQHQRVHTGEKPYVCGECGHAFSARRSLIQHERIHTGEKPFQCTECGKAFSLKATLIVHLRTHTGEKPYECNSCGKAFSQYSVLIQHQRIHTGEKPYECGECGRAFNQHGHLIQHQKVHRKL

SEQ ID NO: 16052 - protein, 671 aa, Homo sapiens
MAATFQLPGHQEMPLTFQDVAVYFSQAEGRQLGPQQRALYRDVMLENYGNVASLGFPVPKPELISQLEQGKELWVLNLLGAEEPDILKSCQKDSEVGTKKELSILNQKFSEEVKTPEFVSRRLLRDNAQAAEFREAWGREGKLKERVGNSAGQSLNKPNIHKRVLTEATVGRERSLGERTQECSAFDRNLNLDQNVVRLQRNKTGERVFKCDICSKTFKYNSDLSRHQRSHTGEKPYECGRCGRAFTHSSNLVLHHHIHTGNKPFKCDECGKTFGLNSHLRLHRRIHTGEKPFGCGECGKAFSRSSTLIQHRIIHTGEKPYKCNECGRGFSQSPQLTQHQRIHTGEKPHECSHCGKAFSRSSSLIQHERIHTGEKPHKCNQCGKAFSQSSSLFLHHRVHTGEKPYVCNECGRAFGFNSHLTEHVRIHTGEKPYVCNECGKAFRRSSTLVQHRRVHTGEKPYQCVECGKAFSQSSQLTLHQRVHTGEKPYDCGDCGKAFSRRSTLIQHQKVHSGETRKCRKHGPAFVHGSSLTADGQIPTGEKHGRAFNHGANLILRWTVHTGEKSFGCNEYGKAFSPTSRPTEDQIMHAGEKPYKCQECGNAFSGKSTLIQHQVTHTGQKPCHCSVYGKAFSQSSQLTPPQQTRVGEKPALNDGSKRYFIHIKKIFQERHF

SEQ ID NO: 16053 - protein, 211 aa, Homo sapiens
MLRQSCSFPVTSLPALGGVCGREGAGAEVPPAACGCEGRDPDTERSCGRSSTGGCSPCSGPGPSSPRTSRGALSPSLGRLFPHLQVVIKLRIQLAPAVHLALPTCSLLTSSPPLEGCCHRLNEEAEVQRGFRPIAVELEFENQPLGAETRLRNGRRAGVKRSEGRGQVRPGQVRSTGPEGGLTRMERKAARLQWDSGSIKMSENEQLWEEP

SEQ ID NO: 16054 - protein, 499 aa, Homo sapiens
MGPLQFRDVAIEFSLEEWHCLDTAQRNLYRDVMLENYRNLVFLGIVVSKPDLVTCLEQGKKPLTMERHEMIAKPPVMSSHFAQDLWPENIQNSFQIGMLRRYEECRHDNLQLKKGCKSVGEHKVHKGGYNGLNQCLTTTQKEIFQCDKYGKVFHKFSNSNTYKTRHTGINLFKCIICGKAFKRSSTLTTHKKIHTGEKPYRCEECGKAFNQSANLTTHKRIHTGEKPYRCEECGKAFKQSSNLTTHKKIHTGEKPYKCEECGKAFNRSTDLTTHKIVHTGEKPYKCEECGKAFKHPSHVTTHKKIHTRGKPYNCEECGKSFKHCSNLTIHKRIHTGEKPYKCEECGKAFHLSSHLTTHKILHTGEKPYRCRECGKAFNHSTTLFSHEKIHTGEKPYKCDECGKTFTWPSILSKHKRTHTGEKPYKCEECGKSFTASSTLTTHKRIHTGEKPYKCEECGKAFNWSSDLNKHKKIHIERKPYIVKNVTDLLNVPPLLISIR

SEQ ID NO: 16055 - protein, 659 aa, Homo sapiens
MPGPPRSLEMGLLTFRDVAIEFSLEEWQHLDIAQQNLYRNVMLENYRNLAFLGIAVSKPDLITCLEQGKEPWNMKRHEMVDEPPGMCPHFAQDLWPEQGMEDSFQKAILRRYGKYGHENLQLRKGCKSVDEYKVNKEGYNGLNQCFTTAQSKVFQCDKYLKVFYKFLNSNRPKIRHTEKKSFKCKKRVKLFCMLSHKTQHKSIYHREKSYKCKECGKTFNWSSTLTNHRKIYTEEKPYKCEEYNKSPKQLSTLTTHEIIHAGEKLYKCEECGEAFNRSSNLTTHKIIHTGEKPYKCEECGKAFIWSSTLTEHKKIHTRKKPYKCEECGKAFIWSSTLTRHKRMHTGEKPYKCEECGKAFSQSSTLTTHKIIHTGEKRYKCLECGKAFKQLSTLTTHKIIHVGEKLYKCEECGKGFNRSSNLTTHKIIHTGEKPYKCEECGKAFIWSSTLTKHKRIHTREKPYKCEECGKAFIWSSTLTRHKRMHTGEKPYKCEECGKSFSQSSTLTTHKIIHTGEKPYKCEECGKAFNWSSTLTKHKIIHTEEKPYKCEKCGKAFKQSSILTNHKRIHTGEKPYKCEECGKSFNRSSTFTKHKVIHTGVKPYKCEECGKAFFWSSTLTKHKRIHTGEQPYKWEKFGKAFNRSSHLTTDKITHWREILQV

SEQ ID NO: 16056 - protein, 627 aa, Homo sapiens
MAAAELTAPAQGIVTFEDVAVYFSWKEWGLLDEAQKCLYHDVMLENLTLTTSLGGSGAGDEEAPYQQSTSPQRVSQVRIPKALPSPQKTNPCEICGPVLRQILHLVEHQGTHHGQKLYTDGACRKQLQFTAYLHQHQKQHVGQKHFRSNGGRDMFLSSCTFEVSGKPFTCKEVGKDFLVRSRFLQQQAAHTRKKSNRTKSAVAFHSVKNHYNWGECVKAFSYKHVRVQHQGDLIRERSYMCSECGKSFSTSCSLSDHLRVHTSEKPYTCGECGKSYRQSSSLITHRRIHTGVRPHQCDECGKLFNRKYDLLIHQRVHTGERPYKCSECGKSFSHSSSLITHQRIHTGMRPYECSECGKSFIHSSSLITHQRVHTGTRPYMCSECGKSFSQSCHLIKHRRLHIGEGPYECSECGKLFTYRSRFFQHQRVHTGVRSHECHECGKLFSRKFDLIVHERVHTGERPYECSECGKSFTCKSYLISHWKVHTGARPYECGECGKSFTHSSTLLQHQRVHTGERPYECNECGKFFSQSSSLIRHRRSHTGERPYECSECWKSFSNHSSLVKHRRVHTGERPYECSECGKSFSQSSNLTNHQRIHSGERPYECSDCGKFFTFNSNLLKHQNVHKG

SEQ ID NO: 16057 - protein, 563 aa, Homo sapiens
MGPLTIRDVTVEFSLEEWHCLDTAQQNLYRDVMLENYRNLVFLGIAVSKPDLITCLEQGKEPCNMKRHEMVAKPPVMCSHIAEDLCPERDIKYFFQKVILRRYDKCEHENLQLRKGCKSVDECKVCKGGYNGLNQCLITTQSKMYQCDKYVKVFYKFSNSDRHKIRHTEKKTCKCKECGKSFCMLSQLTRHKRIHIRENSHKCEECGKAFNQSSALTRHKMTHTGEKPYKCEECGKAFNRSSHLTQHKVIHTREKPYKCEECGKAFNRSSHITQHKRIHNREKPFKYDECCKAFKWSSALTTLTQHKRIHTGEKPYKCEECGKAFNQSSALTRHKMIHTGEKPFQCEECGKAFNRSSHLTQHKIIHTKEKPYKCEECGKAFNRSSHLTKHKRIHTREKAYKCDEYCKAFNWSSALTTLTQHKIIHTGEKPYKCEECGKAFNRSSYLIRHKIIHTGEKPYKCEECGKAFNQSSHLTQHKIIHTGEKPYKCEECGKAFNRSSHLSQHKIIHTGEKPYKCEECGKPFNRFSYLTVHKRIHAGENPNKYEECGKACNHSSNLTKHNS

SEQ ID NO: 16058 - protein, 533 aa, Homo sapiens; identical to SEQ ID NO: 14404

SEQ ID NO: 16059 - protein, 412 aa, Homo sapiens
MIGMLESLQHESDLLQHDQIHTGEKPYECNECRKTFSLKQNLVEHKKMHTGEKSHECTECGKVCSRVSSLTLHLRSHTGKKAYKCNKCGKAFSQKENFLSHQKHHTGEKPYECEKVSIQMPTIIRHQKNHTGTKPYACKECGKAFNGKAYLTEHEKIHTGEKPFECNQCGRAFSQKQYLIKHQNIHTGKKPFKCSECGKAFSQKENLIIHQRIHTGEKPYECKGCGKAFIQKSSLIRHQRSHTGEKPYTCKECGKAFSGKSNLTEHEKIHIGEKPYKCNECGTIFRQKQYLIKHHNIHTGEKPYECNKCGKAFSRITSLIVHVRIHTGDKPYECKVCGKAFCQSSSLTVHMRSHTGEKPYGCNECGKAFSQFSTLALHMRIHTGEKPYQCSECGKAFSQKSHHIRHQRIHTH

SEQ ID NO: 16060 - protein, 683 aa, Homo sapiens
MASGPGSQEREGLLIVKLEEDCAWSQELPPPDPGPSPEASHLRFRRFRFQEAAGPREALSRLQELCHGWLRPEMRTKEQILELLVLEQFLTILPQEIQSRVQELHPESGEEAVTLVEDMQRELGRLRQQVTNHGRGTEVLLEEPLPLETARESPSFKLEPMETERSPGPRLQELLGPSPQRDPQAVKERALSAPWLSLFPPEGNMEDKEMTGPQLPESLEDVAMYISQEEWGHQDPSKRALSRDTVQESYENVDSLESHIPSQEVPGTQVGQGGKLWDPSVQSCKEGLSPRGPAPGEEKFENLEGVPSVCSENIHPQVLLPDQARGEVPWSPELGRPHDRSQGDWAPPPEGGMEQALAGASSGRELGRPKELQPKKLHLCPLCGKNFSNNSNLIRHQRIHAAERLCMGVDCTEIFGGNPRFLSLHRAHLGEEAHKCLECGKCFSQNTHLTRHQRTHTGEKPYQCNICGKCFSCNSNLHRHQRTHTGEKPYKCPECGEIFAHSSNLLRHQRIHTGERPYKCPECGKSFSRSSHLVIHERTHERERLYPFSECGEAVSDSTPFLTNHGAHKAEKKLFECLTCGKSFRQGMHLTRHQRTHTGEKPYKCTLCGENFSHRSNLIRHQRIHTGEKPYTCHECGDSFSHSSNRIRHLRTHTGERPYKCSECGESFSRSSRLMSHQRTHTG

SEQ ID NO: 16061 - protein, 627 aa, Homo sapiens
MAAAVLTDRAQVSVTFDDVAVTFTKEEWGQLDLAQRTLYQEVMLENCGLLVSLGCPVPKAELICHLEHGQEPWTRKEDLSQDTCPGDKGKPKTTEPTTCEPALSEGISLQGQVTQGNSVDSQLGQAEDQDGLSEMQEGHFRPGIDPQEKSPGKMSPECDGLGTADGVCSRIGQEQVSPGDRVRSHNSCESGKDPMIQEEENNFKCSECGKVFNKKHLLAGHEKIHSGVKPYECTECGKTFIKSTHLLQHHMIHTGERPYECMECGKAFNRKSYLTQHQRIHSGEKPYKCNECGKAFTHRSNFVLHNRRHTGEKSFVCTECGQVFRHRPGFLRHYVVHSGENPYECLECGKVFKHRSYLMWHQQTHTGEKPYECSECGKVFLESAALIHHYVIHTGEKPFECLECGKAFNHRSYLKRHQRIHTGEKPFVCSECGKAFTHCSTFILHKRAHTGEKPFECKECGKAFSNRKDLIRHFSIHTGEKPYECVECGKAFTRMSGLTRHKRIHSGEKPYECVECGKSFCWSTNLIRHAIIHTGEKPYKCSECGKAFSRSSSLTQHQRMHTGKNPISVTDVGRPFTSGQTSVTLRELLLGKDFLNVTTEANILPEETSSSASDQPYQRETPQVSSL

SEQ ID NO: 16062 - protein, 549 aa, Homo sapiens
MLENYKNLATVGYQLFKPSLISWLEQEESRTVQRGDFQASEWKVQLKTKELALQQDVLGEPTSSGIQMIGSHNGGEVSDVKQCGDVSSEHSCLKTHVRTQNSENTFECYLYGVDFLTLHKKTSTGEQRSVFSQCGKAFSLNPDVVCQRTCTGEKAFDCSDSGKSFINHSHLQGHLRTHNGESLHEWKECGRGFIHSTDLAVRIQTHRSEKPYKCKECGKGFRYSAYLNIHMGTHTGDNPYECKECGKAFTRSCQLTQHRKTHTGEKPYKCKDCGRAFTVSSCLSQHMKIHVGEKPYECKECGIAFTRSSQLTEHLKTHTAKDPFECKICGKSFRNSSCLSDHFRIHTGIKPYKCKDCGKAFTQNSDLTKHARTHSGERPYECKECGKAFARSSRLSEHTRTHTGEKPFECVKCGKAFAISSNLSGHLRIHTGEKPFECLECGKAFTHSSSLNNHMRTHSAKKPFTCMECGKAFKFPTCVNLHMRIHTGEKPYKCKQCGKSFSYSNSFQLHERTHTGEKPYECKECGKAFSSSSSFRNHERRHADERLSA

SEQ ID NO: 16063 - protein, 743 aa, Homo sapiens
MGLLTFRDVAVEFSLEEWEHLEPAQKNLYQDVMLENYRNLVSLGLVVSKPDLITFLEQRKEPWNVKSEETVAIQPDVFSHYNKDLLTEHCTEASFQKVISRRHGSCDLENLHLRKRWKREECEGHNGCYDEKTFKYDQFDESSVESLFHQQILSSCAKSYNFDQYRKVFTHSSLLNQQEEIDIWGKHHIYDKTSVLFRQVSTLNSYRNVFIGEKNYHCNNSEKTLNQSSSPKNHQENYFLEKQYKCKEFEEVFLQSMHGQEKQEQSYKCNKCVEVCTQSLKHIQHQTIHIRENSYSYNKYDKDLSQSSNLRKQIIHNEEKPYKCEKCGDSLNHSLHLTQHQIIPTEEKPCKWKECGKVFNLNCSLYLTKQQQIDTGENLYKCKACSKSFTRSSNLIVHQRIHTGEKPYKCKECGKAFRCSSYLTKHKRIHTGEKPYKCKECGKAFNRSSCLTQHQTTHTGEKLYKCKVCSKSYARSSNLIMHQRVHTGEKPYKCKECGKVFSRSSCLTQHRKIHTGENLYKCKVCAKPFTCFSNLIVHERIHTGEKPYKCKECGKAFPYSSHLIRHHRIHTGEKPYKCKACSKSFSDSSGLTVHRRTHTGEKPYTCKECGKAFSYSSDVIQHRRIHTGQRPYKCEECGKAFNYRSYLTTHQRSHTGERPYKCEECGKAFNSRSYLTTHRRRHTGERPYKCDECGKAFSYRSYLTTHRRSHSGERPYKCEECGKAFNSRSYLIAHQRSHTREKL

SEQ ID NO: 16064 - protein, 947 aa, Homo sapiens
MATRVRTASIWVPPLQERNSSWDRIRKLQGQESILGQGTPGLQPLPGTPRQKQKSRRIEKVLEWLFISQEQPKITKSWGPLSFMDVFVDFTWEEWQLLDPAQKCLYRSVMLENYSNLVSLGYQHTKPDIIFKLEQGEELCMVQAQVPNQTCPNTVWKIDDLMDWHQENKDKLGSTAKSFECTTFGKLCLLSTKYLSRQKPHKCGTHGKSLKYIDFTSDYARNNPNGFQVHGKSFFHSKHEQTVIGIKYCESIESGKTVNKKSQLMCQQMYMGEKPFGCSCCEKAFSSKSYLLVHQQTHAEEKPYGCNECGKDFSSKSYLIVHQRIHTGEKLHECSECRKTFSFHSQLVIHQRIHTGENPYECCECGKVFSRKDQLVSHQKTHSGQKPYVCNECGKAFGLKSQLIIHERIHTGEKPYECNECQKAFNTKSNLMVHQRTHTGEKPYVCSDCGKAFTFKSQLIVHQGIHTGVKPYGCIQCGKGFSLKSQLIVHQRSHTGMKPYVCNECGKAFRSKSYLIIHTRTHTGEKLHECNNCGKAFSFKSQLIIHQRIHTGENPYECHECGKAFSRKYQLISHQRTHAGEKPYECTDCGKAFGLKSQLIIHQRTHTGEKPFECSECQKAFNTKSNLIVHQRTHTGEKPYSCNECGKAFTFKSQLIVHKGVHTGVKPYGCSQCAKTFSLKSQLIVHQRSHTGVKPYGCSECGKAFRSKSYLIIHMRTHTGEKPHECRECGKSFSFNSQLIVHQRIHTGENPYECSECGKAFNRKDQLISHQRTHAGEKPYGCSECGKAFSSKSYLIIHMRTHSGEKPYECNECGKAFIWKSLLIVHERTHAGVNPYKCSQCEKSFSGKLRLLVHQRMHTREKPYECSECGKAFIRNSQLIVHQRTHSGEKPYGCNECGKTFSQKSILSAHQRTHTGEKPCKCTECGKAFCWKSQLIMHQRTHVDDKH

SEQ ID NO: 16065 - protein, 569 aa, Homo sapiens
MSSAPRGPPSVAPLPAGIGRSTAKTPGLPGSLEMGPLTFRDVAIEFSLEEWQCLDTSQQNLYRNVMLDNYRNLVFLGIAVSKPDLITCLEQGKEPCNMKRHAMVAKPPVVCSHFAQDLWPKQGLKDSFQKVILRRYGKYGHENLQLRKGCKSADEHKVHKRGYNGLNQCLTTTQSKIFQCDKYVKVLHKFSNSNIHKKRQTGKKPFKCKECGKSCCILSQLTQHKKTATRVNFYKCKTCGKAFNQFSNLTKHKIIHPEVNPYKCEECGKAFNQSLTLTKHKKIHTEEKPYKCEDCGKVFSVFSVLTKHKIIHTGTKPYNCEECGKGFSIFSTLTKHKIIHTGEKPYKCNECGKAFNWSSTLTKHKRIHTGEKPYKCEECGKAFNQSSTLTRHKIVHTGEKPYKCEECGKAFKRSTTLTKHKRIYTKEKPYKCEECGKAFSVFSTLTKHKIIHTGAKPYKCEECGSAFRAFSTLTEHKRVHTGEKPYKCNECGKAFNWSSTLTKHKRIHTGEKPYKCEECGKAFNRSSNLTRHKKIHTGEKPYKPKRCDSAFDNTPNFSRHKRNHMGEKS

SEQ ID NO: 16066 - protein, 653 aa, Homo sapiens
MASRLPTAWSCEPVTFEDVTLGFTPEEWGLLDLKQKSLYREVMLENYRNLVSVEHQLSKPDVVSQLEEAEDFWPVERGIPQDTIPEYPELQLDPKLDPLPAESPLMNIEVVEVLTLNQEVAGPRNAQIQALYAEDGSLSADAPSEQVQQQGKHPGDPEAARQRFRQFRYKDMTGPREALDQLRELCHQWLQPKARSKEQILELLVLEQFLGALPVKLRTWVESQHPENCQEVVALVEGVTWMSEEEVLPAGQPAEGTTCCLEVTAQQEEKQEDAAICPVTVLPEEPVTFQDVAVDFSREEWGLLGPTQRTEYRDVMLETFGHLVSVGWETTLENKELAPNSDIPEEEPAPSLKVQESSRDCALSSTLEDTLQGGVQEVQDTVLKQMESAQEKDLPQKKHFDNRESQANSGALDTNQVSLQKIDNPESQANSGALDTNQVLLHKIPPRKRLRKRDSQVKSMKHNSRVKIHQKSCERQKAKEGNGCRKTFSRSTKQITFIRIHKGSQVCRCSECGKIFRNPRYFSVHKKIHTGERPYVCQDCGKGFVQSSSLTQHQRVHSGERPFECQECGRTFNDRSAISQHLRTHTGAKPYKCQDCGKAFRQSSHLIRHQRTHTGERPYACNKCGKAFTQSSHLIGHQRTHNRTKRKKKQPTS

SEQ ID NO: 16067 - protein, 429 aa, Homo sapiens
MMSHPCVSLLGVPVLNPALVPHLAQGQVLLVSDPSPNTDPAKYSESTSATRHQMKGEDAQPQEMASTSFPRASGPSPEFRQHGDSDGKRGSPQNLPIEHHFACKECGDTFRLKVLLVQHQRVHSEEKGWECGDCGKVFRGVAEFNEHRKSHVAAEPQPGPSRALENAAEKREQMEREAKPFECEECGKRFKKNAGLSQHLRVHSREKPFDCEECGRSFKVNTHLFRHQKLHTSEKPFACKACSRDFLDRQELLKHQRMHTGHLPFDCDDCGKSFRGVNGLAEHQRIHSGAKPYGCPHCGKLFRRSSELTKHRRIHTGEKPYACGQCGKAFRQSSSLLEHARIHSGERPYACGECGKAFRGPSDLIKHRRIHSGLKPYECDKCGKAFRRSSGLSRHRRIHSGARRCECSQCGRVFKRRSALQKHQPTHHE

SEQ ID NO: 16068 - protein, 614 aa, Homo sapiens
MKRDRLGRFLSPGSSRQCGASDGGGGVSRTRGRPSLSGGPRVDGATARRAWGPVGSCGDAGEDGADEAGAGRALAMGHCRLCHGKFSSRSLRSISERAPGASMERPSAEERVLVRDFQRLLGVAVRQDPTLSPFVCKSCHAQFYQCHSLLKSFLQRVNASPAGRRKPCAKVGAQPPTGAEEGACLVDLITSSPQCLHGLVGWVHGHAASCGALPHLQRTLSSEYCGVIQVVWGCDQGHDYTMDTSSSCKAFLLDSALAVKWPWDKETAPRLPQHRGWNPGDAPQTSQGRGTGTPVGAETKTLPSTDVAQPPSDSDAVGPRSGFPPQPSLPLCRAPGQLGEKQLPSSTSDDRVKDEFSDLSEGDVLSEDENDKKQNAQSSDESFEPYPERKVSGKKSESKEAKKSEEPRIRKKPGPKPGWKKKLRCEREELPTIYKCPYQGCTAVYRGADGMKKHIKEHHEEVRERPCPHPGCNKVFMIDRYLQRHVKLIHTEVRNYICDECGQTFKQRKHLLVHQMRHSGAKPLQCEVCGFQCRQRASLKYHMTKHKAETELDFACDQCGRRFEKAHNLNVHMSMVHPLTQTQDKALPLEAEPPPGPPSPSVTTEGQAVKPEPT

SEQ ID NO: 16069 - protein, 450 aa, Homo sapiens
MAASKTQGAVARMQEDRDGSCSTVGGVGYGDSKDCILEPLSLPESPGGTTTLEGSPSVPCIFCEEHFPVAEQDKLLKHMIIEHKIVIADVKLVADFQRYILYWRKRFTEQPITDFCSVIRINSTAPFEEQENYFLLCDVLPEDRILREELQKQRLREILEQQQQERNDTNFHGVCMFCNEEFLGNRSVILNHMAREHAFNIGLPDNIVNCNEFLCTLQKKLDNLQCLYCEKTFRDKNTLKDHMRKKQHRKINPKNREYDRFYVINYLELGKSWEEVQLEDDRELLDHQEDDWSDWEEHPASAVCLFCEKQAETIEKLYVHMEDAHEFDLLKIKSELGLNFYQQVKLVNFIRRQVHQCRCYGCHVKFKSKADLRTHMEETKHTSLLPDRKTWDQLEYYFPTYENDTLLCTLSDSESDLTAQEQNENVPIISEDTSKLYALKQSSILNQLLL

SEQ ID NO: 16070 - protein, 718 aa, Homo sapiens
MALPQGLLTFRDVAIEFSQEEWKCLDPAQRTLYRDVMLENYRNLVSLDISSKCMMKTFFSTGQGNTEAFHTGTLQRQASHHIGDFCFQKIEKDIHGFQFQWKEDETNDHAAPMTEIKELTGSTGQHDQRHAGNKHIKDQLGLSFHSHLPELHIFQPEGKIGNQVEKSINNASSVSTSQRICCRPKTHISNKYGNNSLHSSLLTQKRNVHMREKSFQCIESGKSFNCSSLLKKHQITHLEEKQCKCDVYGKVFNQKRYLACHRRSHIDEKPYKCNECGKIFGHNTSLFLHKALHTADKPYECEECDKVFSRKSHLETHKIIYTGGKPYKCKVCDKAFTCNSYLAKHTIIHTGEKPYKCNECGKVFNRLSTLARHRRLHTGEKPYECEECEKVFSRKSHLERHKRIHTGEKPYKCKVCDKAFAYNSYLAKHSIIHTGEKPYKCNECGKVFNQQSTLARHHRLHTAEKPYKCEECDKVFRCKSHLERHRRIHTGEKPYKCKVCDKAFRSDSCLTEHQRVHTGEKPYMCNECGKVFSTKANLACHHKLHTAEKPYKCEECEKVFSRKSHMERHRRIHTGEKPYKCKVCDKAFRRDSHLAQHQRVHTGEKPYKCNECGKTFRQTSSLIIHRRLHTGEKPYKCNECGKTFSQMSSLVYHHRLHSGEKPYKCNECGKVFNQQAHLAQHQRVHTGEKPYKCNECGKTFSQMSNLVYHHRLHSGEKP

SEQ ID NO: 16071 - protein, 542 aa, Homo sapiens
MGDIFLCKKVESPKKNLRESKQREEDDEDPDLIYVGVEHVHRDAEVLFVGMISNSKPVVSNILNRVTPGSKSRRKKGHFRQYPAHVSQPANHVTSMAKAIMPVSLSEGRSTDSPVTMKSSSEPGYKMSSPQVVSPNYSDSLPPGTQCLVGAMVSGGGRNESSPDSKRLSTSDINSRDSKRVKLRDGIPGVPSLAVVPSDMSSTISTNTPSQGICNSSNHVQNGVTFPWPDANGKAHFNLTDPERANESGLAMTDISSLASQNKTFDPKKENPIVLLSNFYYGQHKGDGQPEQKTHTTFKCLSCVKVLKNIKFMNHMKHHLEFEKQRNDSWEDHTTCQHCHRQFPTPFQLQCHIDSVHIAMGPSAVCKICELSFETDQVLLQHMKDHHKPGEMPYVCQVCHYRSSVFADVETHFRTCHENTKNLLCLFCLKLFKTAIPYMNHCWRHSRRRVLQCSKCRLQFLTLKEEIEHKTKDHQTFKKPEQLQGFPRETKVIIQTSVQPGSSGMASVIVSNTDPQSSPVKTKKKTAMNTRDSRLPCSKDSS

SEQ ID NO: 16072 - protein, 543 aa, Homo sapiens
MEQSCEEEKEPEPQKNIQETKQVDDEDAELIFVGVEHVNEDAELIFVGVTSNSKPVVSNILNRVTPGSWSRRKKYDHLRKDTARKLQPKSHETVTSEAVTVLPASQLESRSTDSPIIIEPLSKPDYRNSSPQVVPNNSSELPSPLITFTDSLHHPVSTALSVGGINESPRVSKQLSTFEVNSINPKRAKLRDGIIEGNSSASFPSDTFHTMNTQQSTPSNNVHTSLSHVQNGAPFPAAFPKDNIHFKPINTNLDRENELAKTDILSLTSQNKTFDPKKENPIVLLSDFYYGQHKGEGQPEQKTHTTFKCLSCVKVLKNVKFMNHVKHHLEFEKQRNDSWENHTTCQHCHRQFPTPFQLQCHIENVHTAQEPSTVCKICELSFETDQVLLQHMKDHHKPGEMPYVCQVCHYRSSVFADVETHFRTCHENTKNLLCPFCLKIFKTATPYMCHYRGHWGKSAHQCSKCRLQFLTFKEKMEHKTQCHQMFKKPKQLEGLPPETKVTIQVSLEPLQPGSVDVASITVSTSDSEPSLPRSKSKISKKSH

SEQ ID NO: 16073 - protein, 737 aa, Homo sapiens
MDDDKPFQPKNISKMAELFMECEEEELEPWQKKVEETQDEDDDELIFVGEISSSKPAISNILNRGHSSSSSKGIKSEPHSPGIPEIFRTASQRCRDPPSNPVAASPRFHLVSKSSQSSVTVENASKPDFTKNSQVGSDNSSILLFDSTQESLPPSQDIPAIFREGMKNTSYVLKHPSTSKVNSVTPKKPKTSEDVPQINPSTSLPLIGSPPVTSSQVMLSKGTNTSSPYDAGADYLRACPKCNVQFNLLDPLKYHMKHCCPDMITKFLGVIVKSERPCDEDKTDSETGKLIMLVNEFYYGRHEGVTEKEPKTYTTFKCFSCSKVLKNNIRFMNHMKHHLELEKQNNESWENHTTCQHCYRQYPTPFQLQCHIESTHTPHEFSTICKICELSFETEHILLQHMKDTHKPGEMPYVCQVCQFRSSTFSDVEAHFRAAHENTKNLLCPFCLKVSKMATPYMNHYMKHQKKGVHRCPKCRLQFLTSKEKAEHKAQHRTFIKPKELEGLPPGAKVTIRASLGPLQSKLPTAPFGCAPGTSFLQVTPPTSQNTTARNPRKSNASRSKTSKLHATTSTASKVNTSKPRGRIAKSKAKPSYKQKRQRNRKNKMSLALKNIRCRRGIHKCIECHSKIKDFASHFSIYIHCSFCKYNTNCNKAFVNHMMSSHSNHPGKRFCIFKKHSGTLRGITLVCLKCDFLADSSGLDRMAKHLSQRKTHTCQVIIENVSKSTSTSEPTTGCSLK

SEQ ID NO: 16074 - protein, 979 aa, Homo sapiens
MGDNPFQPKSNSKMAELFMECEEEELEPWQKKVKEVEDDDDDEPIFVGEISSSKPAISNILNRVNPSSYSRGLKNGALSRGITAAFKPTSQHYTNPTSNPVPASPINFHPESRSSDSSVIVQPFSKPGYITNSSRVVSNKSSELLFDLTQDTGLSHYQGGPTLSMAGMSESSFLSKRPSTSEVNNVNPKKPKPSESVSGANSSAVLPSVKSPSVTSSQAMLAKGTNTSSNQSKNGTPFPRACPKCNIHFNLLDPLKNHMKYCCPDMINNFLGLAKTEFSSTVNKNTTIDSEKGKLIMLVNDFYYGKHEGDVQEEQKTHTTFKCFSCLKILKNNIRFMNHMKHHLELEKQSSESWENHTTCQHCYRQFPTPFQLQCHIESTHTPHEFSTICKICELSFETEHVLLQHMKDNHKPGEMPYVCQVCNYRSSSFSDVETHFRTSHENTKNLLCPFCLKVIKIATPYMHHYMKHQKKGIHRCTKCRLQFLTCKEKMDHKTQHHRTFIKPKQLEGLPPGTKVTIRASVGPLQSGASPTPSISASASTLQLSPPRTKNITAKNPAKSNTSKPNTVKSNASKPNTSKPNGSKSKYKPKISNMQKKQSTLASSNKKSKVNTALRNLRYRRGIHKCIECCSEIKDFANHFPTYVHCSFCRYNTSCSKAYVNHMMSFHSNRPSKRFCIFKKHSENLRGITLVCLNCDFLSDVSGLDNMATHLSQHKTHTCQVVMQKVSVCIPTSEHLSELKKEAPAKEQEPVSKEIARPNMAERETETSNSESKQDKAASSKEKNGCNANSFEGSSTTKSEESITVSDKENETCLADQETGSKNIVSCDSNIGADKVEKKKQIQHVCQEMELKMCQSSENIILSDQIKDHNSSEARFSSKNIKDLRLASDNVSIDQFLRKRHEPESVSSDVSEQGSIHLEPLTPSEVLEYEATEILQKGSGDPSAKTDEVVSDQTDDIPGGNNPSTTEATVDLEDEKERS

SEQ ID NO: 16075 - protein, 895 aa, Homo sapiens
MKIGSGFLSGGGGTGSSGGSGSGGGGSGGGGGGGSSGRRAEMEPTFPQGMVMFNHRLPPVTSFTRPAGSAAPPPQCVLSSSTSAAPAAEPPPPPAPDMTFKKEPAASAAAFPSQRTSWGFLQSLVSIKQEKPADPEEQQSHHHHHHHHYGGLFAGAEERSPGLGGGEGGSHGVIQDLSILHQHVQQQPAQHHRDVLLSSSSRTDDHHGTEEPKQDTNVKKAKRPKPESQGIKAKRKPSASSKPSLVGDGEGAILSPSQKPHICDHCSAAFRSSYHLRRHVLIHTGERPFQCSQCSMGFIQKYLLQRHEKIHSREKPFGCDQCSMKFIQKYHMERHKRTHSGEKPYKCDTCQQYFSRTDRLLKHRRTCGEVIVKGATSAEPGSSNHTNMGNLAVLSQGNTSSSRRKTKSKSIAIENKEQKTGKTNESQISNNINMQSYSVEMPTVSSSGGIIGTGIDELQKRVPKLIFKKGSRKNTDKNYLNFVSPLPDIVGQKSLSGKPSGSLGIVSNNSVETIGLLQSTSGKQGQISSNYDDAMQFSKKRRYLPTASSNSAFSINVGHMVSQQSVIQSAGVSVLDNEAPLSLIDSSALNAEIKSCHDKSGIPDEVLQSILDQYSNKSESQKEDPFNIAEPRVDLHTSGEHSELVQEENLSPGTQTPSNDKASMLQEYSKYLQQAFEKSTNASFTLGHGFQFVSLSSPLHNHTLFPEKQIYTTSPLECGFGQSVTSVLPSSLPKPPFGMLFGSQPGLYLSALDATHQQLTPSQELDDLIDSQKNLETSSAFQSSSQKLTSQKEQKNLESSTGFQIPSQELASQIDPQKDIEPRTTYQIENFAQAFGSQFKSGSRVPMTFITNSNGEVDHRVRTSVSDFSGYTNMMSDVSEPCSTRVKTPTSQSYR

SEQ ID NO: 16076 - protein, 671 aa, Homo sapiens
MQFVSTRPQPQQLGIQGLGLDSGSWSWAQALPPEEVCHQEPALRGEMAEGMPPMQAQEWDMDARRPMPFQFPPFPDRAPVFPDRMMREPQLPTAEISLWTVVAAIQAVERKVDAQASQLLNLEGRTGTAEKKLADCEKTAVEFGNHMESKWAVLGTLLQEYGLLQRRLENLENLLRNRNFWVLRLPPGSKGEAPKVPVTFVDIAVYFSEDEWKNLDEWQKELYNNLVKENYKTLMSLDAEGSVPKPDAPVQAEPREEPCVWEQRHPEEREIPMDPEAGAEPLVPAQDASSQVKREDTLCVRGQRGLEERAIPTESITDSPISAQDLLSRIKQEEHQCVWDQQDLADRDIPTDPNSESLISAHDILSWIKQEEQPYPWGPRDSMDGELGLDSGPSDSLLMVKNPPPAPPQPQPQPQPPQPQLQSQPQPQSLPPIAVAENPGGPPSRGLLDDGFQVLPGERGSGEAPPGGDRSTGGGGGDGGGGGGGAEAGTGAGGGCGSCCPGGLRRSLLLHGARSKPYSCPECGKSFGVRKSLIIHHRSHTKERPYECAECEKSFNCHSGLIRHQMTHRGERPYKCSECEKTYSRKEHLQNHQRLHTGERPFQCALCGKSFIRKQNLLKHQRIHTGERPYTCGECGKSFRYKESLKDHLRVHSGGPGPGAPRQLPPPPERD

SEQ ID NO: 16077 - protein, 679 aa, Homo sapiens
MESRSVAQAGVQWCDLGSLQAPPPGFTLFSCLSLLSSWDYSSGFSGFCASPIEESHGALISSCNSRTMTDGLVTFRDVAIDFSQEEWECLDPAQRDLYVDVMLENYSNLVSLDLESKTYETKKIFSENDIFEINFSQWEMKDKSKTLGLEASIFRNNWKCKSIFEGLKGHQEGYFSQMIISYEKIPSYRKSKSLTPHQRIHNTEKSYVCKECGKACSHGSKLVQHERTHTAEKHFECKECGKNYLSAYQLNVHQRFHTGEKPYECKECGKTFSWGSSLVKHERIHTGEKPYECKECGKAFSRGYHLTQHQKIHTGVKSYKCKECGKAFFWGSSLAKHEIIHTGEKPYKCKECGKAFSRGYQLTQHQKIHTGKKPYECKICGKAFCWGYQLTRHQIFHTGEKPYECKECGKAFNCGSSLIQHERIHTGEKPYECKECGKAFSRGYHLSQHQKIHTGEKPFECKECGKAFSWGSSLVKHERVHTGEKSHECKECGKTFCSGYQLTRHQVFHTGEKPYECKECGKAFNCGSSLVQHERIHTGEKPYECKECGKAFSRGYHLTQHQKIHTGEKPFKCKECGKAFSWGSSLVKHERVHTNEKSYECKDCGKAFGSGYQLSVHQRFHTGEKLYQRKEFGKTFTCGSKLVHERTHSNDKPYKYNECGEAFLWTTYSNEKIDTDETL

SEQ ID NO: 16078 - protein, 593 aa, Homo sapiens
MTMFKEAVTFKDVAVVFTEEELGLLDVSQRKLYRDVMLENFRNLLSVGHQLSHRDTFHFQREEKFWIMETATQREGNSGGKIQTELESVPETGPHEEWSCQQIWEQTASELTRPQDSISSSQFSTQGDVPSQVDAGLSIIHIGETPSEHGKCKKFFSDVSILDLHQQLHSGKISHTCNEYRKRFCYSSALCLHQKVHMGEKRYKCDVCSKAFSQNSQLQTHQRIHTGEKPFKCEQCGKSFSRRSGMYVHCKLHTGEKPHICEECGKAFIHNSQLREHQRIHTGEKPFKCYICGKSFHSRSNLNRHSMVHMQEKSFRCDTCSNSFGQRSALNSHCMDHTKEKLYKCEECGRSFTCRQDLCKHQMDHTGDKPYNCNVCGKGFRWSSCLSRHQRVHNGETTFKCDGCGKRFYMNSQGHSHQRAYREEELYKCQKCGKGYISKFNLDLHQRVHTGERPYNCKECGKSFRWASGILRHKRLHTGEKPFKCEECGKRFTENSKLRFHQRIHTGEKPYKCEECGKGFRWASTHLTHQRLHSREKLFQCEDCGKSSEHSSCLQDQQSDHSGEKTSKCEDCGKRYERRLNLDMILSLFLNDI

SEQ ID NO: 16079 - protein, 590 aa, Homo sapiens
MIKFQERVTFKDVAVVFTKEELALLDKAQINLYQDVMLENFRNLMLVRDGIKNNILNLQAKGLSYLSQEVLHCWQIWKQRIRDLTVSQDYIVNLQEECSPHLEDVSLSEEWAGISLQISENENYVVNAIIKNQDITAWQSLTQVLTPESWRKANIMTEPQNSQGRYKGIYMEEKLYRRAQHDDSLSWTSCDHHESQECKGEDPGRHPNCGKNLGMKSTVEKRNAAHVLPQPFPCNNCGVAFADDTDPHVHHSTHLGEKSYKCDQYGKNFSQSQDLIVHCKTHSGKTPYEFHEWPMGCKQSSDLPRYQKVSSGDKPYKCKECGKGFRRSSSLHNHHRVHTGEMPYKCDECGKGFGFRSLLCIHQGVHTGKKPYKCEECGKGFDQSSNLLVHQRVHTGEKPYKCSECGKCFSSSSVLQVHWRFHTGEKPYRCGECGKGFSQCTHLHIHQRVHTGEKPYKCNVCGKDFAYSSVLHTHQRVHTGEKPYKCEVCGKCFSYSSYFHLHQRDHIREKPYKCDECGKGFSRNSDLNVHLRVHTRERPYKCKACGKGFSRNSYLLAHQRVHIDETQYTHCERGKDLLTHQRLHEQRETL

SEQ ID NO: 16080 - protein, 521 aa, Homo sapiens
METDLAEMPEKGALSSQDSPHFQEKSTEEGEVAALRLTARSQETVTFKDVAMDFTPEEWGKLDPAQRDVMLENYRNLVSLWLPVSKPESYNLENGKEPLKLERKAPKSSYSDMETRPQSKDSTSVQDFSKAESCKVAIIDRLTRNSVYDSNLEAALECENWLENQQGNQERHLREMFTHMNSLSEETDHKHDVYWKSFNQKSVLITEDRVPKGSYAFHTLEKSLKQKSNLMKKQRTYKEKKPHKCNDCGELFTYHSVLIRHQRVHTGEKPYTCNECGKSFSHRANLTKHQRTHTRILFECSECKKTFTESSSLATHQRIHVGERPYECNECGKGFNRSTHLVQHQLIHTGVKPYECNECDKAFIHSSALIKHQRTHTGEKPYKCQECGKAFSHCSSLTKHQRVHTGEKPYECSECGKTFSQSTHLVQHQRIHTGEKPYECNECGKTFSRSSNFAKHQRIHIGKKPYKCSECGKAFIHSSALIQHQRTHTGEKPFRCNECGKSFKCSSSLIRHQRVHTEEQP

SEQ ID NO: 16081 - protein, 522 aa, Homo sapiens
METDLAEMPEKGVLSSQDSPHFQEKSTEEGEVAALRLTARSQAAAAAAAPGSRSLRGVHVPPPLHPAPAREEIKSTCSLKACFSLSLTLTYYRTAFLLSTENEGNLHFQCPSDVETRPQSKDSTSVQDFSKAESCKVAIIDRLTRNSVYDSNLEAALECENWLEKQQGNQERHLREMFTHMNSLSEETDHEHDVYWKSFNQKSVLITEDRVPKGSYAFHTLEKSLKQKSNLMKKQRTYKEKKPHKCNDCGELFTCHSVHIQHQRVHTGEKPYTCNECGKSFSHRANLTKHQRTHTRILFECRECKKTFTESSSLATHQRIHVGERPYECNECGKGFNRSTHLVQHQLIHTGVRPYECNECDKAFIHSSALIKHQRTHTGEKPYKCQECGKAFSHCSSLTKHQRVHTGEKPYECSECGKTFSQSTHLVQHQRIHTGEKPYECSECGKTFSQSSNFAKHQRIHIGKKPYKCSECGKAFIHSSALIQHQRTHTGEKPFRCNECGKSFKCSSSLIRHQRVHTEEQP

SEQ ID NO: 16082 - protein, 754 aa, Homo sapiens
MNSSSRSQILLRWKSDKAQSGPYNVEKEILTSRFLRDTETCRQNFRNFPYPDLAGPRKALSQLRELCLKWLRPEIHSKEQILELLVLEQFLTILPGEVRTWVKSQYPESSEEAVTLVEDLTQILEEEAPQNSTLSQDTPEEDPRGKHAFQTGWLNDLVTKESMTFKDVAVDITQEDWELMRPVQKELYKTVTLQNYWNMVSLGLTVYRPTVIPILEEPWMVIKEILEGPSPEWETKAQACTPVEDMSKLTKEETHTIKLEDSYDYDDRLERRGKGGFWKIHTDERGFSLKSVLSQEYDPTEECLSKYDIYRNNFEKHSNLIVQFDTQLDNKTSVYNEGRATFNHVSYGIVHRKILPGEKPYKCNVCGKKFRKYPSLLKHQSTHAKEKSYECEECGKEFRHISSLIAHQRMHTGEKPYECHQCGKAFSQRAHLTIHQRIHTGEKPYKCDDCGKDFSQRAHLTIHQRTHTGEKPYKCLECGKTFSHSSSLINHQRVHTGEKPYICNECGKTFSQSTHLLQHQKIHTGKKPYKCNECWKVFSQSTYLIRHQRIHSGEKCYKCNECGKAFAHSSTLIQHQTTHTGEKSYICNICGKAFSQSANLTQHHRTHTGEKPYKCSVCGKAFSQSVHLTQHQRIHNGEKPFKCNICGKAYRQGANLTQHQRIHTGEKPYKCNECGKAFIYSSSLNQHQRTHTGERPYKCNECDKDFSQRTCLIQHQRIHTGEKPYACRICGKTFTQSTNLIQHQRVHTGAKHRN

SEQ ID NO: 16083 - protein, 2723 aa, Homo sapiens
MADEEAEQERLSCGEGGCVAELQRLGERLQELELQLRESRVPAVEAATDYCQQLCQTLLEYAEKWKTSEDPLPLLEVYTVAIQSYVKARPYLTSECENVALVLERLALSCVELLLCLPVELSDKQWEQFQTLVQVAHEKLMENGSCELHFLATLAQETGVWKNPVLCTILSQEPLDKDKVNEFLAFEGPILLDMRIKHLIKTNQLSQATALAKLCSDHPEIGIKGSFKQTYLVCLCTSSPNGKLIEEISEVDCKDALEMICNLESEGDEKSALVLCTAFLSRQLQQGDMYCAWELTLFWSKLQQRVEPSIQVYLERCRQLSLLTKTVYHIFFLIKVINSETEGAGLATCIELCVKALRLESTENTEVKISICKTISCLLPDDLEVKRACQLSEFLIEPTVDAYYAVEMLYNQPDQKYDEENLPIPNSLRCELLLVLKTQWPFDPEFWDWKTLKRQCLALMGEEASIVSSIDELNDSEVYEKVVDYQEESKETSMNGLSGGVGANSGLLKDIGDEKQKKREIKQLRERGFISARFRNWQAYMQYCVLCDKEFLGHRIVRHAQKHYKDGIYSCPICAKNFNSKETFVPHVTLHVKQSSKERLAAMKPLRRLGRPPKITTTNENQKTNTVAKQEQRPIKKNSLYSTDFIVFNDNDGSDDENDDKDKSYEPEVIPVQKPVPVNEFNCPVTFCKKGFKYFKNLIAHVKGHKDNEDAKRFLEMQSKKVICQYCRRHFVSVTHLNDHLQMHCGSKPYICIQMKCKAGFNSYAELLTHRKEHQVFRAKCMFPKCGRIFSEAYLLYDHEAQHYNTYTCKFTGCGKVYRSQGELEKHLDDHSTPPEKVLPPEAQLNSSGDSIQPSEVNQNTAENIEKERSMLPSENNIENSLLADRSDAWDKSKAESAVTKQDQISASELRQANGPLSNGLENPATTPLLQSSEVAVSIKVSLNQGIEDNFGKQENSTVEGSGEALVTDLHTPVEDTCNDLCHPGFQERKEQDCFNDAHVTQNSLVNSETLKIGDLTPQNLERQVNNLMTFSVQNQAAFQNNLPTSKFECGDNVKTSSNLYNLPLKTLESIAFVPPQSDLSNSLGTPSVPPKAPVQKFSCQVEGCTRTYNSSQSIGKHMKTAHPDQYAAFKMQRKSKKGQKANNLNTPNNGKFVYFLPSPVNSSNPFFTSQTKANGNPACSAQLQHVSPPIFPAHLASVSTPLLSSMESVINPNITSQDKNEQGGMLCSQMENLPSTALPAQMEDLTKTVLPLNIDSGSDPFLPLPAESSSMSLFPSPADSGTNSVFSQLENNTNHYSSQIEGNTNSSFLKGGNGENAVFPSQVNVANNFSSTNAQQSAPEKVKKDRGRGPNGKERKPKHNKRAKWPAIIRDGKFICSRCYRAFTNPRSLGGHLSKRSYCKPLDGAEIAQELLQSNGQPSLLASMILSTNAVNLQQPQQSTFNPEACFKDPSFLQLLAENRSPAFLPNTFPRSGVTNFNTSVSQEGSEIIKQALETAGIPSTFEGAEMLSHVSTGCVSDASQVNATVMPNPTVPPLLHTVCHPNTLLTNQNRTSNSKTSSIEECSSLPVFPTNDLLLKTVENGLCSSSFPNSGGPSQNFTSNSSRVSVISGPQNTRSSHLNKKGNSASKRRKKVAPPLIAPNASQNLVTSDLTTMGLIAKSVEIPTTNLHSNVIPTCEPQSLVENLTQKLNNVNNQLFMTDVKENFKTSLESHTVLAPLTLKTENGDSQMMALNSCTTSINSDLQISEDNVIQNFEKTLEIIKTAMNSQILEVKSGSQGAGETSQNAQINYNIQLPSVNTVQNNKLPDSSPFSSFISVMPTKSNIPQSEVSHKEDQIQEILEGLQKLKLENDLSTPASQCVLINTSVTLTPTPVKSTADITVIQPVSEMINIQFNDKVNKPFVCQNQGCNYSAMTKDALFKHYGKIHQYTPEMILEIKKNQLKFAPFKCVVPTCTKTFTRNSNLRAHCQLVHHFTTEEMVKLKIKRPYGRKSQSENVPASRSTQVKKQLAMTEENKKESQPALELRAETQNTHSNVAVIPEKQLVEKKSPDKTESSLQVITVTSEQCNTNALTNTQTKGRKIRRHKKEKEEKKRKKPVSQSLEFPTRYSPYRPYRCVHQGCFAAFTIQQNLILHYQAVHKSDLPAFSAEVEEESEAGKESEETETKQTLKEFRCQVSDCSRIFQAITGLIQHYMKLHEMTPEEIESMTASVDVGKFPCDQLECKSSFTTYLNYVVHLEADHGIGLRASKTEEDGVYKCDCEGCDRIYATRSNLLRHIFNKHNDKHKAHLIRPRRLTPGQENMSSKANQEKSKSKHRGTKHSRCGKEGIKMPKTKRKKKNNLENKNAKIVQIEENKPYSLKRGKHVYSIKARNDALSECTSRFVTQYPCMIKGCTSVVTSESNIIRHYKCHKLSKAFTSQHRNLLIVFKRCCNSQVKETSEQEGAKNDVKDSDTCVSESNDNSRTTATVSQKEVEKNEKDEMDELTELFITKLINEDSTSVETQANTSSNVSNDFQEDNLCQSERQKASNLKRVNKEKNVSQNKKRKVEKAEPASAAELSSVRKEEETAVAIQTIEEHPASFDWSSFKPMGFEVSFLKFLEESAVKQKKNTDKDHPNTGNKKGSHSNSRKNIDKTAVTSGNHVCPCKESETFVQFANPSQLQCSDNVKIVLDKNLKDCTELVLKQLQEMKPTVSLKKLEVHSNDPDMSVMKDISIGKATGRGQY

SEQ ID NO: 16084 - protein, 475 aa, Homo sapiens
MSRRKAGSAPRRVEPAPAANPDDEMEMQDLVIELKPEPDAQPQQAPRLGPFSPKEVSSAGRFGGEPHHSPGPMPAGAALLALGPRNPWTLWTPLTPNYPDRQPWTDKHPDLLTCGRCLQTFPLEAITAFMDHKKLGCQLFRGPSRGQGSEREELKALSCLRCGKQFTVAWKLLRHAQWDHGLSIYQTESEAPEAPLLGLAEVAAAVSAVVGPAAEAKSPRASGSGLTRRSPTCPVCKKTLSSFSNLKVHMRSHTGERPYACDQCPYACAQSSKLNRHKKTHRQVPPQSPLMADTSQEQASAAPPEPAVHAAAPTSTLPCSGGEGAGAAATAGVQEPGAPGSGAQAGPGGDTWGAITTEQRTDPANSQKASPKKMPKSGGKSRGPGGSCEFCGKHFTNSSNLTVHRRSHTGERPYTCEFCNYACAQSSKLNRHRRMHGMTPGSTRFECPHCHVPFGLRATLDKHLRQKHPEAAGEA

SEQ ID NO: 16085 - protein, 446 aa, Homo sapiens
METQADLVSQEPQALLDSALPSKVPAFSDKDSLGDEMLAAALLKAKSQELVTFEDVAVYFIRKEWKRLEPAQRDLYRDVMLENYGNVFSLDRETRTENDQEISEDTRSHGVLLGRFQKDISQGLKFKEAYEREVSLKRPLGNSPGERLNRKMPDFGQVTVEEKLTPRGERSEKYNDFGNSFTVNSNLISHQRLPVGDRPHKCDECSKSFNRTSDLIQHQRIHTGEKPYECNECGKAFSQSSHLIQHQRIHTGEKPYECSDCGKTFSCSSALILHRRIHTGEKPYECNECGKTFSWSSTLTHHQRIHTGEKPYACNECGKAFSRSSTLIHHQRIHTGEKPYECNECGKAFSQSSHLYQHQRIHTGEKPYECMECGGKFTYSSGLIQHQRIHTGENPYECSECGKAFRYSSALVRHQRIHTGEKPLNGIGMSKSSLRVTTELNIREST

SEQ ID NO: 16086 - protein, 623 aa, Homo sapiens
MAHKYVGLQYHGSVTFEDVAIAFSQQEWESLDSSQRGLYRDVMLENYRNLVSMGHSRSKPHVIALLEQWKEPEVTVRKDGRRWCTDLQLEDDTIGCKEMPTSENCPSFALHQKISRQKPRECQEYGKTLCQDSKPVQHERIHSSEKPNRCKECGKNFSNGHQLTIHQRLHVGEKPYKYEKCGKAFISGSAFVKHGRIHTGEKPLKCKQCGKTISGSYQLTVHKSIHTGKKPYECGECGKAFLVYGKLTRHQSTHTGEKPFGCEECGKAFSTFSYLVQHQRIHTSEKPYECKECGKAFSTSSPLAKHQRIHTGEKPYECKECGKSFTVYGQLTRHQSIHTGEKPFECKECGKAFRLSSFLHAHQRIHAEIKPYGCKECGRTFSRASYLVQHGRLHTGEKPYECKECGKAFSTGSYLVQHQRIHTGEKPYECKECGKAFISRHQLTVHQRVHTGEKPYECKECGKAFRVHVHLTQHRKIHTDVKPYECKECGKTFSRASYLVQHSRIHTGKKPYECKECGKAFSSGSYLVQHQRIHTGEKPYECNKCGKAFTVYGQLIGHQSVHTGEKPFECKECGKAFRLNSFLTEHQRVHTGEKPFKCKKCGKTFRYSSALKVHLRKHMSVIP

SEQ ID NO: 16087 - protein, 604 aa, Homo sapiens
MMKSQGLVSFKDVAVDFTQEEWQQLDPSQRTLYRDVMLENYSHLVSMGYPVSKPDVISKLEQGEEPWIIKGDISNWIYPDEYQADGRQDRKSNLHNSQSCILGTVSFHHKILKGVTRDGSLCSILKVCQGDGQLQRFLENQDKLFRQVTFVNSKTVTEASGHKYNPLGKIFQECIETDISIQRFHKYDAFKKNLKPNIDLPSCYKSNSRKKPDQSFGGGKSSSQSEPNSNLEKIHNGVIPFDDNQCGNVFRNTQSLIQYQNVETKEKSCVCVTCGKAFAKKSQLIVHQRIHTGKKPYDCGACGKAFSEKFHLVVHQRTHTGEKPYDCSECGKAFSQKSSLIIHQRVHTGEKPYECSECGKAFSQKSPLIIHQRIHTGEKPYECRECGKAFSQKSQLIIHHRAHTGEKPYECTECGKAFCEKSHLIIHKRIHTGEKPYKCAQCEEAFSRKTELITHQLVHTGEKPYECTECGKTFSRKSQLIIHQRTHTGEKPYKCSECGKAFCQKSHLIGHQRIHTGEKPYICTECGKAFSQKSHLPGHQRIHTGEKPYICAECGKAFSQKSDLVLHQRIHTGERPYQCAICGKAFIQKSQLTVHQRIHTVVKS

SEQ ID NO: 16088 - protein, 478 aa, Homo sapiens
MSQVTFSDVAIDFSHEEWACLDSAQRDLYKDVMVQNYENLVSVGLSVTKPYVIMLLEDGKEPWMMEKKLSKAYPFPLSHSVPASVNFGFSALFEHCSEVTEIFELSELCVFWVLHFLSNSPNSTVEAFSRSKKKKKKKKKRQCFAFLIYFRLGIKMGKQGIINKEGYLYEDSPQPVTMEKVVKQSYEFSNSNKNLEYTECDTFRSTFHSKSTLSEPQNNSAEGNSHKYDILKKNLSKKSVIKSERINGGKKLLNSNKSGAAFNQSKSLTLPQTCNREKIYTCSECGKAFGKQSILSRHWRIHTGEKPYECRECGKTFSHGSSLTRHQISHSGEKPYKCIECGKAFSHGSSLTNHQSTHTGEKPYECMNCGKSFSRVSLLIQHLRIHTQEKRYECRICGKAFIHSSSLIHHQKSHTGEKPYECRECGKAFCCSSHLTQHQRIHSMKKKYECNKCLKVFSSFSFLVQHQSIHTEEKPFEV

SEQ ID NO: 16089 - protein, 659 aa, Homo sapiens
MAAAVLMDRVQSCVTFEDVFVYFSREEWELLEEAQRFLYRDVMLENFALVATLGFWCEAEHEAPSEQSVSVEGVSQVRTAESGLFQKAHPCEMCDPLLKDILHLAEHQGSHLTQKLCTRGLCRRRFSFSANFYQHQKQHNGENCFRGDDGGASFVKSCTVHMLGRSFTCREEGMDLPDSSGLFQHQTTYNRVSPCRRTECMESFPHSSSLRQHQGDYDGQMLFSCGDEGKAFLDTFTLLDSQMTHAEVRPFRCLPCGNVFKEKSALINHRKIHSGEISHVCKECGKAFIHLHHLKMHQKFHTGKRHYTCSECGKAFSRKDTLVQHQRVHTGERSYDCSECGKAYSRSSHLVQHQRIHTGERPYKCNKCGKAFSRKDTLVQHQRFHTGERPYECSECGKFFSQSSHLIEHWRIHTGARPYECIECGKFFSHNSSLIKHRRVHTGARSYVCSKCGKAFGCKDTLVQHQIIHTGARPYECSECGKAFSRKDTLVQHQKIHTGERPYECGECGKFFSHSSNLIVHQRIHTGAKPYECNECGKCFSHNSSLILHQRVHTGARPYVCSECGKAYISSSHLVQHKKVHTGARPYECSECGKFFSRNSGLILHQRVHTGEKPYVCSECGKAYSRSSHLVRHQKAHTGERAHECNSFGGPLAASLKLV

SEQ ID NO: 16090 - protein, 666 aa, Homo sapiens
MQEVVLLDESSGPPSQLLWTRQDTQLPQESALLPAPYPAFTKDGSQGNLPQADITLMSQAQESVTFEDVAVNFTNREWQCLTYAQRHLYKDVMLENYGNMVSLGFPFPKPPLISHLEREVDPCVQDPQDRESLSCSYPVSADKMWPENEKASSQQEIFENGEAYWMKFNSLLKVDSRDPKVREVCVQDVKLENQWETSIREKLREEKEGSEEVTCKKGKNQKVLSKNLNPNSKHSQCNKVLIAQKLHECARCGKNFSWHSDLILHEQIHSGEKPHVCNECGKAFKTRNQLSMHRIIHTGEKPFNCTQCGKAFNSRSALCRHKKTHSGEKPHECRDCGKAFKTRNRLCMHQLIHTGEKPYKCNCCGKAFQFKHSLTIHGRIHTGEKPYECEECGKAFSGSSDLTKHIRIHTGERPYECSKCGRAFSRSSDLSKHKRIHTREKHYGCPQCGKDFSIKAELTKHRRIHTEEKRYRCEECGKAFRHNCKRRAHEREHTGEKPYQCRDCGKTFQDKHCLTIHQRIHTGEKPYKCLECGKAFSGKSNLTNHRRIHTGEKPHKCEVCGMAFHHSSVLRQHKRIHTGEKPYTCSECGTSFRQGSALIGHKRVHTGEKPYECEECGKAFRVSSNLTGHKKRKHQVWSTHELDGSRKSLSPVTVSQTSVVSILTSA

SEQ ID NO: 16091 - protein, 1004 aa, Homo sapiens
MAALHTTPDSPAAQLERAEDGSECDPDQEEEEEEEEKGEEVQEVEEEEEEIVVEEEEEGVAEVVQDAQVEAVAEVEVEADVEEEDVKEVLAEEECPALGTQERLSRGGDAKSPVLQEKGLQASRAPATPRDEDLEEEEEEEEDEDEDDLLTAGCQELVTFEDVAVYFSLEEWERLEADQRGLYQEVMQENYGILVSLGYPIPKPDLIFRLEQGEEPWVPDSPRPEEGDIVTGVYTGAWFWTDDIEDHEEEDDEDFLAEVAEEENEPPGLWSAAYGVGDVPGTWGPDDSDSAQTPEGWGPDPGGLGVLADGSEAKPFLPGREPGANLLSPWAFPAAVAPPAGRPETTCDVCGKVFPHRSRLAKHQRYHAAVKPFGCEECGKGFVYRSHLAIHQRTHTGEKPFPCPDCGKRFVYKSHLVTHRRIHTGERPYRCAFCGAGFGRRSYLVTHQRTHTGERPYPCSHCGRSFSQSSALARHQAVHTADRPHCCPDCGQAFRLRADFQRHRRGGGCAEAGGDGPRREPGETAAAAGPEDTDPGPEGSEVGEADGEAEAAAEEREEAAVAAPTPSGKVDPAPERRFLELGNGLGEGEGPSSHPLGFHFPVHPKSWLHPDSFPILGLPDFRERLPVDGRPLPAPLGGPLSLVEGTGLACDPFGGGGAAGGGGGLRAFGPAIGGLLAEPAPAALAEEESPWICSDCGKTFGRRAALAKHQRYHAGERPHRCADCGKSFVYGSHLARHRRTHTGERPFPCPECGARFARGSHLAAHVRGHTGEKPFVCGVCGAGFSRRAHLTAHGRAHTGERPYACGECGRRFGQSAALTRHQWAHAEEKPHRCPDCGKGFGHSSDFKRHRRTHTGEKPFRCADCGRGFAQRSNLAKHRRGHTGERPFPCPECGKRFSQRSVLVTHQRTHTGERPYACANCGRRFSQSSHLLTHMKTHRGATAAPGSGSAPAPAPKPEAAAKGPSSAGPGERGSALLEFAGGTSFGSEHQAAFAGPSGAYREGVL

SEQ ID NO: 16092 - protein, 595 aa, Homo sapiens
MAALSPTFATSTQDSTCLQDSEFPVSSKDHSCPQNLDLFVCSGLEPHTPSVGSQESVTFQDVAVDFTEKEWPLLDSSQRKLYKDVMLENYSNLTSLGYQVGKPSLISHLEQEEEPRTEERGAHQGACADWETPSKTKWSLLMEDIFGKETPSGVTMERAGLGEKSTEYAHLFEVFGMDPHLTQPMGRHAGKRPYHRRDYGVAFKGRPHLTQHMSMYDGRKMHECHQCQKAFTTSASLTRHRRIHTGEKPYECSDCGKAFNDPSALRSHARTHLKEKPFDCSQCGNAFRTLSALKIHMRVHTGERPYKCDQCGKAYGRSCHLIAHKRTHTGERPYECHDCGKAFQHPSHLKEHVRNHTGEKPYACTQCGKAFRWKSNFNLHKKNHMVEKTYECKECGKSFGDLVSRRKHMRIHIVKKPVECRQCGKTFRNQSILKTHMNSHTGEKPYGCDLCGKAFSASSNLTAHRKIHTQERRYECAACGKVFGDYLSRRRHMSVHLVKKRVECRQCGKAFRNQSTLKTHMRSHTGEKPYECDHCGKAFSIGSNLNVHRRIHTGEKPYECLVCGKAFSDHSSLRSHVKTHRGEKLFVSSVWKRLQ

SEQ ID NO: 16093 - protein, 2279 aa, Homo sapiens
MYRSSARSSVSSHRPKDDGGGGPRSGRSSGSSSGPARRSSPPPPPSGSSSRTPARRPRSPSGHRGRRASPSPPRGRRVSPSPPRARRGSPSPPRGRRLFPPGPAGFRGSSRGESRADYARDGRGDHPGDSGSRRRSPGLCSDSLEKSLRITVGNDHFCVSTPERRRLSDRLGSPVDNLEDMDRDDLTDDSVFTRSSQCSRGLERYISQEEGPLSPFLGQLDEDYRTKETFLHRSDYSPHISCHDELLRGTERNREKLKGYSIRSEERSREAKRPRYDDTVKINSMGGDHPSFTSGTRNYRQRRRSPSPRFLDPEFRELDLARRKREEEEERSRSLSQELVGVDGGGTGCSIPGLSGVLTASEPGYSLHRPEEVSVMPKKSILKKRIEVDIMEPSMQLESFSSSTSSSQDHPLYSGHPSLPLSGAIAAFASEIENKGTMVETALKEPQGNLYQWGPLPGIPKDNSPLREKFGSFLCHKDNLDLKAEGPERHTDFLLPHERASQDGSGFSRILSMLADSTSTQEKRRRSFPDIEDEEKFLYGDEEEDLKAESVPKPLGSSESEVMRQKASSLPSSAPAVKLESLEETNPEYAKIHDLLKTIGLDIGVAEISQLAARTQERLHGKKPSLRSSADRRSSVDRYFSADHCSSVDHRFSADRCSSVDHCFSADRRSSDPHRLESREAHHSNTHSPEVSHPHPPSPVDPYLLTKNSPPFLKSDHPVGHISGPEVVGSGFQSSVAVRCMLPSAPSAPIRLPHTAALSQFHMPRASQFAAARIPPNYQGPAIPPASFDAYRHYMAYAASRWPMYPTSQPSNHPVPEPHRIMPITKQATRSRPNLRVIPTVTPDKPKQKESLRGSIPAAQVPVQVSIPSLIRYNPEKISDEKNRASQKQKVIEEREKLKNDREARQKKMYYLRTELERLHKQQGEMLRKKRREKDGHKDPLLVEVSRLQDNIMKDIAELRQEAEEAEKKQSELDKVAQILGINIFDKSQKSLSDSREPTEKPGKAEKSKSPEKVSSFSNSSSNKESKVNNEKFRTKSPKPAESPQSATKQLDQPTAAYEYYDAGNHWCKDCNTICGTMFDFFTHMHNKKHTQTLDPYNRPWASKTQSEAKQDAIKRTDKITVPAKGSEFLVPISGFYCQLCEEFLGDPISGEQHVKGHQHNEKYKKYVDENPLYEERRNLDRQAGLAVVLETERRRQSELKRKLSEKPKEEKKEKKAKAVKEVKEDDKVSEKLEDQLSEGRNSPEKAENKRNTGIKLQLKEEVKKESPTSSSFGKFSWKKPEKEEEKSSLVTPSISKEEILESSKDKEDGKTEAGKAKPIKIKLSGKTVVAHTSPWMPVVTTSTQTKIRPNLPIPSTVLRKSCSATMSKPAPLNTFLSIKSSGTTAKPLPVVKESSADLLLPPDIISKAFGGEEVILKGSPEEKVVLAEKSEPSHLPEQILPPPPPPPPPPPPPPPVIPHPAAPSAAQANAILAPVKSNPVVSQTLSPGFVGPNILNPVLPVAIMASAQPAAIPSDETAPGVSESDRDQTLFSVLVRPPPPLSSVFSEQAKKLEKRNSCLATANAKDLYDIFYSSGGKGAPETKGAPETKLSGGPLANGENSNLSRTKSSDTSSTSPLNSSASQEELHQDEGLVAAPIVSNSEKPIAKTLVALGKWSVVEHVGPKSTGSTYGFLQPLTRLCQSRPYETITPKTDTLAIWTSSSFQSDTSRDISPEKSELDLGEPGPPGVEPPPQLLDIQCKESQKLVEIHLRESVNQDKESQELRKSEDCRESEIETNTELKERVKELSEGIVDEGVSTSIGPHSIDDSNLNHGNRYMWEGEVKQPNLLMIDKEAEQSNKLMTGSETPSKVVIKLSPQACSFTKAKLDSFLSEARSLLNPQDTPVKISAPELLLHSPARSAMCLTGSPQEQGVSVVSEEGLENSAPESASRTSRYRSLKLKRERSKDFQVKKIYELAVWDENKKRPETWESPEKPKTEALELQDVHPELTVTIESKALEDFEATDLKVEELTALGNLGDMPVDFCTTRVSPAHRSPTVLCQKVCEENSVSPIGCNSSDPADFEPIPSFSGFPLDSPKTLVLDFETEGERNSPNPRSVRIPSPNILKTGLTENVDRGLGGLEGTHQALDLLAGGMMPEEVKESSQLDKQESLGLELKTINSAGLGPSPCLPDLVDFVTRTSGVQKDKLCSPLSEPGDPSKCSSLELGPLQLEISNASTTEVAILQVDDDSGDPLNLVKAPVSRSPPREQVIEDNMVPQGMPEQETTVGAIQDHTESSVHN

SEQ ID NO: 16094 - protein, 582 aa, Homo sapiens
MSESWQQPPQTQPQQPQPPQPQHHAEPPPALAEHTLPPGTAENPLGCAVYGILLQPDPGLQPPQHAPLQAAGEPGPKCGVCGHDLAHLSSPHEHQCLAGHDRSFQCTQCLKIFHQATDLLEHQCVQAEQKPFVCGVCKMGFSLLTSLAQHHSSHSGLVKCSICEKTYKPAEAAEPATTAAPSLPAAPAPSTVTPAEQADKPYSCPICQKPFKHLSELSRHERIHTGEKPYKCTLCDKSFSQSSHLVHHKRTHSSERPYKCAVCEKTFKHRSHLVRHMYAHSGEHHLFRCNVCELHFKESSELLQHPCTPSGERPFRCGECQKAFKRPSDLRQHERTHSAERPFKCDLCPMGFKQQYALMRHRRTHKTEEPFKCGLCEKGFGQPSHLLYHQHVHTLETLFKCPVCQKGFDQSAELLRHKCLPGAAERPFKCPVCNKAYKRASALQKHQLAHCAAAEKPLRCTLCERRFFSSSEFVQHRCDPAREKPLKCPDCEKRFKYASDLQRHRRVHTGEKPYKCPNCDKAFKQREHLNKHQGVHAREQQFKCVWCGERFLDVALLQEHSAQHSAAAAAAEGAYQVAACLP

SEQ ID NO: 16095 - protein, 273 aa, Homo sapiens
MFGFPTATLLDCHGRYAQNVAFFNVMTEAHHKYDHSEATGSSSWDIQNSFRREKLEQKSPDSKTLQEDSPGVRQRVYECQECGKSFRQKGSLTLHERIHTGQKPFECTHCGKSFRAKGNLVTHQRIHTGEKPYQCKECGKSFSQRGSLAVHERLHTGQKPYECAICQRSFRNQSNLAVHRRVHSGEKPYRCDQCGKAFSQKGSLIVHIRVHTGLKPYACTQCRKSFHTRGNCILHGKIHTGETPYLCGQCGKSFTQRGSLAVHQRSCSQRLTL

SEQ ID NO: 16096 - protein, 509 aa, Homo sapiens
MALSQGLLTFRDVAIEFSQEEWKCLDPAQRTLYRDVMLENYRNLVSLDISSKCMMNTLSSTGQGNTEVIHTGTLQRQASYHIGAFCSQEIEKDIHDFVFQWQEDETNDHEAPMTEIKKLTSSTDRYDQRHAGNKPIKGQLESRFHLHLRRHRRIHTGEKPYKCEECEKVFSCKSHLEIHRIIHTGEKPYKCKVCDKAFKHDSHLAKHTRIHRGDKHYTCNECGKVFDQKATLACHHRSHTGEKPYKCNECGKTFSQTSHLVYHHRLHTGEKPYKCNECGKTFARNSVLVIHKAVHTAEKPYKCNECGKVFKQRATLAGHRRVHTGEKPYRCEECDKVFSRKSHLERHRRIHTGEKPYKCKVCDKAFRSDSRLAEHQRVHTGERPYTCNECGKVFSTKAYLACHQKLHTGEKLYECEECDKVYIRKSHLERHRRIHTGEKPHKCGDCGKAFNSPSHLIRHQRIHTGQKSYKCHQCGKVFSLRSLLAEHQKIPFGDNCFKCNEYSKPSSIN

SEQ ID NO: 16097 - protein, 402 aa, Homo sapiens
MYTSEEKCNQRTQKRKIYNVCPRKGKKIFIHMHEIIQIDGHIYQCLECKQNFCENLALIMCERTHTGEKPYKCDMCEKTFVQSSDLTSHQRIHNYEKPYKCSKCEKSFWHHLALSGHQRTHAGKKFYTCDICGKNFGQSSDLLVHQRSHTGEKPYLCSECDKCFSRSTNLIRHRRTHTGEKPFKCLECEKAFSGKSDLISHQRTHTGERPYKCNKCEKSYRHRSAFIVHKRVHTGEKPYKCGACEKCFGQKSDLIVHQRVHTGEKPYKCLECMRSFTRSANLIRHQATHTHTFKCLEYEKSFNCSSDLIVHQRIHMEEKPHQWSACESGFLLGMDFVAQQKMRTQTEELHYKYTVCDKSFHQSSALLQHQTVHIGEKPFVCNVSEKGLELSPPHASEASQMS

SEQ ID NO: 16098 - protein, 553 aa, Homo sapiens
MAFEDVAVYFSQEEWGLLDTAQRALYRRVMLDNFALVASLGLSTSRPRVVIQLERGEEPWVPSGTDTTLSRTTYRRRNPGSWSLTEDRDVSGEWPRAFPDTPPGMTTSVFPVAGACHSVKSLQRQRGASPSRERKPTGVSVIYWERLLLGSGSGQASVSLRLTSPLRPPEGVRLREKTLTEHALLGRQPRTPERQKPCAQEVPGRTFGSAQDLEAAGGRGHHRMGAVWQEPHRLLGGQEPSTWDELGEALHAGEKSFECRACSKVFVKSSDLLKHLRTHTGERPYECAQCGKAFSQTSHLTQHQRIHSGETPYACPVCGKAFRHSSSLVRHQRIHTAEKSFRCSECGKAFSHGSNLSQHRKIHAGGRPYACAQCGRRFCRNSHLIQHERTHTGEKPFVCALCGAAFSQGSSLFKHQRVHTGEKPFACPQCGRAFSHSSNLTQHQLLHTGERPFRCVDCGKAFAKGAVLLSHRRIHTGEKPFVCTQCGRAFRERPALFHHQRIHTGEKTVRRSRASLHPQARSVAGASSEGAPAKETEPTPASGPAAVSQPAEV

SEQ ID NO: 16099 - protein, 544 aa, Homo sapiens
MTFEDVAVYFSQEEWGLLDTAQRALYRHVMLENFTLVTSLGLSTSRPRVVIQLERGEEPWVPSGKDMTLARNTYGRLNSGSWSLTEDRDVSGEWPRAFPDTPPGMTTSVFPVADACHSVKSLQRQPGASPSQERKPTGVSVIYWERLLLGSRSDQASISLRLTSPLRPPKSSRPREKTFTEYRVPGRQPRTPERQKPCAQEVPGRAFGNASDLKAASGGRDRRMGAAWQEPHRLLGGQEPSTWDELGEALHAGEKSFECRACSKVFVKSSDLLKHLRTHTGERPYECTQCGKAFSQTSHLTQHQRIHSGETPYACPVCGKAFRHSSSLVRHQRIHTAEKSFRCSECGKAFSHGSNLSQHRKIHAGGRPYACAQCGRRFCRNSHLIQHERTHTGEKPFVCALCGAAFSQGSSLFLHQRVHTGEKPFACAQCGRSFSRSSNLTQHQLLHTGERPFRCVDCGKGFAKGAVLLSHRRIHTGEKPFVCTQCGRAFRERPALLHHQRIHTTEKTNAAAPDCTPGPGFLQGHHRKVRRGGKPSPVLKPAKV

SEQ ID NO: 16100 - protein, 582 aa, Homo sapiens
MDFEDDYTHSACRNTYQGFNGMDRDYGPGSYGGMDRDYGHGSYGGQRSMDSYLNQSYGMDNHSGGGGGSRFGPYESYDSRSSLGGRDLYRSGYGFNEPEQSRFGGSYGGRFESSYRNSLDSFGGRNQGGSSWEAPYSRSKLRPGFMEDRGRENYSSYSSFSSPHMKPAPVGSRGRGTPAYPESTFGSRNYDAFGGPSTGRGRGRGHMGDFGSIHRPGIVVDYQNKSTNVTVAAARGIKRKMMQPFNKPSGTFIKKPKLAKPMEKISLSKSPTKTDPKNEEEEKRRIEARREKQRRRREKNSEKYGDGYRMAFTCSFCKFRTFEEKDIELHLESSSHQETLDHIQKQTKFDKVVMEFLHECMVNKFKKTSIRKQQTNNQTEVVKIIEKDVMEGVTVDDHMMKVETVHCSACSVYIPALHSSVQQHLKSPDHIKGKQAYKEQIKRESVLTATSILNNPIVKARYERFVKGENPFEIQDHSQDQQIEGDEEDEEKIDEPIEEEEDEDEEEEAEEVGEVEEVEEVEEVREGGIEGEGNIQGVGEGGEVGVVGEVEGVGEVEEVEELEEETAKEEPADFPVEQPEEN

SEQ ID NO: 16101 - protein, 541 aa, Homo sapiens
MRLKMTTRNFPEREVPCDVEVERFTREVPCLSSLGDGWDCENQEGHLRQSALTLEKPGTQEAICEYPGFGEHLIASSDLPPSQRVLATNGFHAPDSNVSGLDCDPALPSYPKSYADKRTGDSDACGKGFNHSMEVIHGRNPVREKPYKYPESVKSFNHFTSLGHQKIMKRGKKSYEGKNFENIFTLSSSLNENQRNLPGEKQYRCTECGKCFKRNSSLVLHHRTHTGEKPYTCNECGKSFSKNYNLIVHQRIHTGEKPYECSKCGKAFSDGSALTQHQRIHTGEKPYECLECGKTFNRNSSLILHQRTHTGEKPYRCNECGKPFTDISHLTVHLRIHTGEKPYECSKCGKAFRDGSYLTQHERTHTGEKPFECAECGKSFNRNSHLIVHQKIHSGEKPYECKECGKTFIESAYLIRHQRIHTGEKPYGCNQCQKLFRNIAGLIRHQRTHTGEKPYECNQCGKAFRDSSCLTKHQRIHTKETPYQCPECGKSFKQNSHLAVHQRLHSREGPSRCPQCGKMFQKSSSLVRHQRAHLGEQPMET

SEQ ID NO: 16102 - protein, 463 aa, Homo sapiens
MAQGLVTFADVAIDFSQEEWACLNSAQRDLYWDVMLENYSNLVSLDLESAYENKSLPTEKNIHEIRASKRNSDRRSKSLGRNWICEGTLERPQRSRGRYVNQMIINYVKRPATREGTPPRTHQRHHKENSFECKDCGKAFSRGYQLSQHQKIHTGEKPYECKECKKAFRWGNQLTQHQKIHTGEKPYECKDCGKAFRWGSSLVIHKRIHTGEKPYECKDCGKAFRRGDELTQHQRFHTGEKDYECKDCGKTFSRVYKLIQHKRIHSGEKPYECKDCGKAFICGSSLIQHKRIHTGEKPYECQECGKAFTRVNYLTQHQKIHTGEKPHECKECGKAFRWGSSLVKHERIHTGEKPYKCTECGKAFNCGYHLTQHERIHTGETPYKCKECGKAFIYGSSLVKHERIHTGVKPYGCTECGKSFSHGHQLTQHQKTHSGAKSYECKECGKACNHLNHLREHQRIHNS

SEQ ID NO: 16103 - protein, 665 aa, Homo sapiens
MESVTFEDVAVEFIQEWALLDSARRSLCKYRMLDQCRTLASRGTPPCKPSCVSQLGQRAEPKATERGILRATGVAWESQLKPEELPSMQDLLEEASSRDMQMGPGLFLRMQLVPSIEERETPLTREDRPALQEPPWSLGCTGLKAAMQIQRVVIPVPTLGHRNPWVARDSAVPARDPAWLQEDKVEEEAMAPGLPTACSQEPVTFADVAVVFTPEEWVFLDSTQRSLYRDVMLENYRNLASVADQLCKPNALSYLEERGEQWTTDRGVLSDTCAEPQCQPQEAIPSQDTFTEILSIDVKGEQPQPGEKLYKYNELEKPFNSIEPLFQYQRIHAGEASCECQEIRNSFFQSAHLIVPEKIRSGDKSYACNKCEKSFRYSSDLIRHEKTHTAEKCFDCQECGQAFKYSSNLRRHMRTHTGEKPFECSQCGKTFTRNFNLILHQRNHTGEKPYECKDCGKAFNQPSSLRSHVRTHTGEKPFECSQCGKAFREHSSLKTHLRTHTREKPYECNQCGKPFRTSTHLNVHKRIHTGEKLYECATCGQVLSRLSTLKSHMRTHTGEKPYVCQECGRAFSEPSSLRKHARTHSGKKPYACQECGRAFGQSSHLIVHVRTHSAGRPYQCNQCEKAFRHSSSLTVHKRTHVGRETIRNGSLPLSMSHPYCGPLAN

SEQ ID NO: 16104 - protein, 680 aa, Homo sapiens
MKMKKFQIPVSFQDLTVNFTQEEWQQLDPAQRLLYRDVMLENYSNLVSVGYHVSKPDVIFKLEQGEEPWIVEEFSNQNYPDIDDALEKNKEIQDKHLTQTVFFSNKTLITERENVFGKTLNLGMNSVPSRKMPYKCNPGGNSLKTNSEVIVAKKSKENRKIPDGYSGFGKHEKSHLGMKKYRYNPMRKASNQNENLILHQNIQILKQPFDYNKCGKTFFKRAILITQKGRQTERKPNECNECRKTFSKRSTLIVHQRIHTGEKPYVCSDCRKTFRVKTSLTRHRRIHTGERPYECSECRKTFIDKSALIVHQKIHGGEKSYECNECGKTFFRKSALAEHFRSHTGEKPYECKECGNAFSKKSYLVVHQRTHRGEKPNECKECGKTFFCQSALTAHQRIHTGEKPYECSECEKTFFCQSALNVHRRSHTGEKPYECSQCGKFLCTKSALIAHQITHRGKKSYECNECGKFFCHKSTLTIHQRTHTGEKHGVFNKCGRISIVKSNCSQCKRMNTKENLYECSEHGHAVSKNSHLIVHQRTIWERPYECNECGRTYCRKSALTHHQRTHTGQRPYECNECGKTFCQKFSFVEHQRTHTGEKPYECNECGKSFCHKSAFRVHRRIHTGEKPYECNQCGKTYRRLWTLTEHQKIHTGEKPYECNKCEKTFRHKSNFLLHQKSHKE

SEQ ID NO: 16105 - protein, 1342 aa, Homo sapiens
MEENEVESSSDAAPGPGRPEEPSESGLGVGTSEAVSADSSDAAAAPGQAEADDSGVGQSSDRGSRSQEEVSESSSSADPLPNSYLPDSSSVSHGPVAGVTGGPPALVHSSALPDPNMLVSDCTASSSDLGSAIDKIIESTIGPDLIQNCITVTSAEDGGAETTRYLILQGPDDGAPMTSPMSSSTLAHSLAAIEALADGPTSTSTCLEAQGGPSSPVQLPPASGAEEPDLQSLEAMMEVVVVQQFKCKMCQYRSSTKATLLRHMRERHFRPVAAAAAAAGKKGRLRKWSTSTKSQEEEGPEEEDDDDIVDAGAIDDLEEDSDYNPAEDEPRGRQLRLQRPTPSTPRPRRRPGRPRKLPRLEISDLPDGVEGEPLVSSQSGQSPPEPQDPEAPSSSGPGHLVAMGKVSRTPVEAGVSQSDAENAAPSCPDEHDTLPRRRGRPSRRFLGKKYRKYYYKSPKPLLRPFLCRICGSRFLSHEDLRFHVNSHEAGDPQLFKCLQCSYRSRRWSSLKEHMFNHVGSKPYKCDECSYTSVYRKDVIRHAAVHSRDRKKRPDPTPKLSSFPCPVCGRVYPMQKRLTQHMKTHSTEKPHMCDKCGKSFKKRYTFKMHLLTHIQAVANRRFKCEFCEFVCEDKKALLNHQLSHVSDKPFKCSFCPYRTFREDFLLSHVAVKHTGAKPFACEYCHFSTRHKKNLRLHVRCRHASSFEEWGRRHPEEPPSRRRPFFSLQQIEELKQQHSAAPGPPPSSPGPPEIPPEATTFQSSEAPSLLCSDTLGGATIIYQQGAEESTAMATQTALDLLLNMSAQRELGGTALQVAVVKSEDVEAGLASPGGQPSPEGATPQVVTLHVAEPGGGAAAESQLGPPDLPQITLAPGPFGGTGYSVITAPPMEEGTSAPGTPYSEEPAGEAAQAVVVSDTLKEAGTHYIMATDGTQLHHIELTADGSISFPSPDALASGAKWPLLQCGGLPRDGPEPPSPAKTHCVGDSQSSASSPPATSKALGLAVPPSPPSAATAASKKFSCKICAEAFPGRAEMESHKRAHAGPGAFKCPDCPFSARQWPEVRAHMAQHSSLRPHQCSQCSFASKNKKDLRRHMLTHTKEKPFACHLCGQRFNRNGHLKFHIQRLHSPDGRKSGTPTARAPTQTPTQTIILNSDDETLATLHTALQSSHGVLGPERLQQALSQEHIIVAQEQTVTNQEEAAYIQEITTADGQTVQHLVTSDNQVQYIISQDGVQHLLPQEYVVVPEGHHIQVQEGQITHIQYEQGAPFLQESQIQYVPVSPGQQLVTQAQLEAAAHSAVTAVADAAMAQAQGLFGTDETVPEHIQQLQHQGIEYDVITLADD

SEQ ID NO: 16106 - protein, 751 aa, Homo sapiens
MGPQGARRQAFLAFGDVTVDFTQKEWRLLSPAQRALYREVTLENYSHLVSLGILHSKPELIRRLEQGEVPWGEERRRRPGPCAGIYAEHVLRPKNLGLAHQRQQQLQFSDQSFQSDTAEGQEKEKSTKPMAFSSPPLRHAVSSRRRNSVVEIESSQGQRENPTEIDKVLKGIENSRWGAFKCAERGQDFSRKMMVIIHKKAHSRQKLFTCRECHQGFRDESALLLHQNTHTGEKSYVCSVCGRGFSLKANLLRHQRTHSGEKPFLCKVCGRGYTSKSYLTVHERTHTGEKPYECQECGRRFNDKSSYNKHLKAHSGEKPFVCKECGRGYTNKSYFVVHKRIHSGEKPYRCQECGRGFSNKSHLITHQRTHSGEKPFACRQCKQSFSVKGSLLRHQRTHSGEKPFVCKDCERSFSQKSTLVYHQRTHSGEKPFVCRECGQGFIQKSTLVKHQITHSEEKPFVCKDCGRGFIQKSTFTLHQRTHSEEKPYGCRECGRRFRDKSSYNKHLRAHLGEKRFFCRDCGRGFTLKPNLTIHQRTHSGEKPFMCKQCEKSFSLKANLLRHQWTHSGERPFNCKDCGRGFILKSTLLFHQKTHSGEKPFICSECGQGFIWKSNLVKHQLAHSGKQPFVCKECGRGFNWKGNLLTHQRTHSGEKPFVCNVCGQGFSWKRSLTRHHWRIHSKEKPFVCQECKRGYTSKSDLTVHERIHTGERPYECQECGRKFSNKSYYSKHLKRHLREKRFCTGSVGEASS

SEQ ID NO: 16107 - protein, 810 aa, Homo sapiens
MNKVEQKSQESVSFKDVTVGFTQEEWQHLDPSQRALYRDVMLENYSNLVSVGYCVHKPEVIFRLQQGEEPWKQEEEFPSQSFPVWTADHLKERSQENQSKHLWEVVFINNEMLTKEQGDVIGIPFNVDVSSFPSRKMFCQCDSCGMSFNTVSELVISKINYLGKKSDEFNACGKLLLNIKHDETHTQEKNEVLKNRNTLSHHEETLQHEKIQTLEHNFEYSICQETLLEKAVFNTQKRENAEENNCDYNEFGRTLCDSSSLLFHQISPSRDNHYEFSDCEKFLCVKSTLSKPHGVSMKHYDCGESGNNFRRKLCLSHLQKGDKGEKHFECNECGKAFWEKSHLTRHQRVHTGQKPFQCNECEKAFWDKSNLTKHQRSHTGEKPFECNECGKAFSHKSALTLHQRTHTGEKPYQCNACGKTFCQKSDLTKHQRTHTGLKPYECYECGKSFRVTSHLKVHQRTHTGEKPFECLECGKSFSEKSNLTQHQRIHIGDKSYECNACGKTFYHKSLLTRHQIIHTGWKPYECYECGKTFCLKSDLTVHQRTHTGQKPFACPECGKFFSHKSTLSQHYRTHTGEKPYECHECGKIFYNKSYLTKHNRTHTGEKPYECNECGKAFYQKSQLTQHQRIHIGEKPYKCNECGKAFCHKSALIVHQRTHTQEKPYKCNECGKSFCVKSGLIFHERKHTGEKPYECNECGKFFRHKSSLTVHHRAHTGEKSCQCNECGKIFYRKSELAQHQRSHTGEKPYECNTCRKTFSQKSNLIVHQRRHIGENLMNEMDIRNFQPQVSLHNASEYSHCGESPDDILNVQ

SEQ ID NO: 16108 - protein, 778 aa, Homo sapiens
MNKVDQKFQGSVSFKDVTVGFTQEEWQHLDPSQRALYRDVMLENYSNLVSVGYCAHKPEVIFRLEQGEEPWRLEEEFPSQSFPEVWTADHLKERSQENQSKHLWEVVFINNEMLTKEQGNVIGIPFNMDVSSFPSRKMFCQYDSRGMSFNTVSELVISKINYLGKKSDEFNACGKLLLNIKHDETHTREKNEVLKNRNTLSHRENTLQHEKIQTLDHNFEYSICQETLLEKAVFNTRKRENAEENNCDYNEFGRTFCDSSSLLFHQIPPSKDSHYEFSDCEKFLCVKSTLSKHDGVPVKHYDCGESGNNFRRKLCLSQLQKGDKGEKHFECNECGKAFWEKSHLTRHQRVHTGEKHFQCNQCGKTFWEKSNLTKHQRSHTGEKPFECNECGKAFSHKSALTLHQRTHTGEKPYQCNACGKTFYQKSDLTKHQRTHTGQKPYECYECGKSFCMNSHLTVHQRTHTGEKPFECLECGKSFCQKSHLTQHQRTHIGDKPYECNACGKTFYHKSVLTRHQIIHTGLKPYECYECGKTFCLKSDLTIHQRTHTGEKPFACPECGKFFSHKSTLSQHYRTHTGEKPYECHECGKIFYNKSYLTKHNRTHTGEKPYECNECGKTFCQKSQLTQHQRIHIGEKPYECNECGKAFCHKSALIVHQRTHTQEKPYKCNECGKSFCVKSGLILHERKHTGEKPYECNECGKSFSHKSSLTVHHRAHTGEKSCQCNECGKIFYRKSDLAKHQRSHTGEKPYECNTCRKTFSQKSNLIVHQRTHIGEKPYE

SEQ ID NO: 16109 - protein, 560 aa, Homo sapiens; identical to SEQ ID NO: 14410

SEQ ID NO: 16110 - protein, 854 aa, Homo sapiens
MAQAIFEALEGMDNQTVLAVQSLLDGQGAVPDPTGQSVNAPPAIQPLDDEDVFLCGKCKKQFNSLPAFMTHKREQCQGNAPALATVSLATNSIYPPSAAPTAVQQAPTPANRQISTYITVPPSPLIQTLVQGNILVSDDVLMSAMSAFTSLDQPMPQGPPPVQSSLNMHSVPSYLTQPPPPPPPPPPLPPPPPPQPPPPPPQSLGPPGRPNPGGNGVVEVYSAAAPLAGSGTVEIQALGMQPYPPLEVPNQCVEPPVYPTPTVYSPGKQGFKPKGPNPAAPMTSATGGTVATFDSPATLKTRRAKGARGLPEAAGKPKAQKLKCSYCDKSFTKNFDLQQHIRSHTGEKPFQCIACGRAFAQKSNVKKHMQTHKVWPPGHSGGTVSRNSVTVQVMALNPSRQEDEESTGLGQPLPGAPQPQALSTAGEEEGDKPESKQVVLIDSSYLCQFCPSKFSTYFQLKSHMTQHKNEQVYKCVVKSCAQTFPKLDTFLEHIKSHQEELSYRCHLCGKDFPSLYDLGVHQYSHSLLPQHSPKKDNAVYKCVKCVNKYSTPEALEHHLQTATHNFPCPHCQKVFPCERYLRRHLPTHGSGGRFKCQVCKKFFRREHYLKLHAHIHSGEKPYKCSVCESAFNRKDKLKRHMLIHEPFKKYKCPFSTHTGCSKEFNRPDKLKAHILSHSGMKLHKCALCSKSFSRRAHLAEHQRAHTGNYKFRCAGCAKGFSRHKYLKDHRCRLGPQKDKDLQTRRPPQRRAAPRSCGSGGRKVLTPLPDPLGLEELKDTGAGLVPEAVPGKPPFAEPDAVLSIVVGGAVGAETELVVPGHAEGLGSNLALAELQAGAEGPCAMLAVPVYIQASE

SEQ ID NO: 16111 - protein, 599 aa, Homo sapiens
MMLPYPSALGDQYWEEILLPKNGENVETMKKLTQNHKAKGLPSNDTDCPQKKEGKAQIVVPVTFRDVTVIFTEAEWKRLSPEQRNLYKEVMLENYRNLLSLAEPKPEIYTCSSCLLAFSCQQFLSQHVLQIFLGLCAENHFHPGNSSPGHWKQQGQQYSHVSCWFENAEGQERGGGSKPWSARTEERETSRAFPSPLQRQSASPRKGNMVVETEPSSAQRPNPVQLDKGLKELETLRFGAINCREYEPDHNLESNFITNPRTLLGKKPYICSDCGRSFKDRSTLIRHHRIHSMEKPYVCSECGRGFSQKSNLSRHQRTHSEEKPYLCRECGQSFRSKSILNRHQWTHSEEKPYVCSECGRGFSEKSSFIRHQRTHSGEKPYVCLECGRSFCDKSTLRKHQRIHSGEKPYVCRECGRGFSQNSDLIKHQRTHLDEKPYVCRECGRGFCDKSTLIIHERTHSGEKPYVCGECGRGFSRKSLLLVHQRTHSGEKHYVCRECRRGFSQKSNLIRHQRTHSNEKPYICRECGRGFCDKSTLIVHERTHSGEKPYVCSECGRGFSRKSLLLVHQRTHSGEKHYVCRECGRGFSHKSNLIRHQRTH

SEQ ID NO: 16112 - protein, 488 aa, Homo sapiens
MENLTKHSIECSSFRGDWECKNQFERKQGSQEGHFSEMIFTPEDMPTFSIQHQRIHTDEKLLECKECGKDFSFVSVLVRHQRIHTGEKPYECKECGKAFGSGANLAYHQRIHTGEKPFECKECGKAFGSGSNLTHHQRIHTGEKPYECKECGKAFSFGSGLIRHQIIHSGEKPYECKECGKSFSFESALIRHHRIHTGEKPYECIDCGKAFGSGSNLTQHRRIHTGEKPYECKACGMAFSSGSALTRHQRIHTGEKPYICNECGKAFSFGSALTRHQRIHTGEKPYVCKECGKAFNSGSDLTQHQRIHTGEKPYECKECEKAFRSGSKLIQHQRMHTGEKPYECKECGKTFSSGSDLTQHHRIHTGEKPYECKECGKAFGSGSKLIQHQLIHTGERPYECKECGKSFSSGSALNRHQRIHTGEKPYECKECGKAFYSGSSLTQHQRIHTGEKLYECKNCGKAYGRDSEFQQHKKSHNGKKLCELETIN

SEQ ID NO: 16113 - protein, 294 aa, Homo sapiens
MEYPAPATVQAADGGAAGPYSSSELLEGQEPDGVRFDRERARRLWEAVSGAQPVGREEVEHMIQKNQCLFTNTQCKVCCALLISESQKLAHYQSKKHANKVKRYLAIHGMETLKGETKKLDSDQKSSRSKDKNQCCPICNMTFSSPVVAQSHYLGKTHAKNLKLKQQSTKVEALHQNREMIDPDKFCSLCHATFNDPVMAQQHYVGKKHRKQETKLKLMARYGRLADPAVTDFPAGKGYPCKTCKIVLNSIEQYQAHVSGFKHKNQSPKTVASSLGQIPMQRQPIQKDSTTLED

SEQ ID NO: 16114 - protein, 839 aa, Homo sapiens
MALTQGQVTFRDVAIEFSQEEWTCLDPAQRTLYRDVMLENYRNLASLGISCFDLSIISMLEQGKEPFTLESQVQIAGNPDGWEWIKAVITALSSEFVMKDLLHKGKSNTGEVFQTVMLERQESQDIEGCSFREVQKNTHGLEYQCRDAEGNYKGVLLTQEGNLTHGRDEHDKRDARNKLIKNQLGLSLQSHLPELQLFQYEGKIYECNQVEKSFNNNSSVSPPQQMPYNVKTHISKKYLKDFISSLLLTQGQKANNWGSPYKSNGCGMVFPQNSHLASHQRSHTKEKPYKCYECGKAFRTRSNLTTHQVIHTGEKRYKCNECGKVFSRNSQLSQHQKIHTGEKPYKCNECGKVFTQNSHLVRHRGIHTGEKPYKCNECGKAFRARSSLAIHQATHSGEKPYKCNECGKVFTQNSHLTNHWRIHTGEKPYKCNECGKAFGVRSSLAIHLVIHTGEKPYKCHECGKVFRRNSHLARHQLIHTGEKPYKCNECGKAFRAHSNLTTHQVIHTGEKPYKCNECGKVFTQNSHLANHQRIHTGVKPYMCNECGKAFSVYSSLTTHQVIHTGEKPYKCNECGKVFTQNSHLARHRGIHTGEKPYKCNECGKVFRHNSYLSRHQRIHTGEKPYKYNEYGKAFSEHSNLTTHQVIHTGEKPYKCNECGKVFTQNSHLARHRRVHTGGKPYQCNECGKAFSQTSKLARHQRVHTGEKPYECNQCGKAFSVRSSLTTHQAIHTGKKPYKCNECGKVFTQNSHLARHRGIHTGEKPYKCNECGKAFSQTSKLARHQRIHTGEKPYECGKPFSICSSLTTHQTIHTGGKPYKCNVWKVLKSEFKPCKPSQNS

SEQ ID NO: 16115 - protein, 527 aa, Homo sapiens
MTAELREAMALAPWGPVKVKKEEEEEENFPGQASSQQVHSENIKVWAPVQGLQTGLDGSEEEEKGQNISWDMAVVLKATQEAPAASTLGSYSLPGTLAKSEILETHGTMNFLGAETKNLQLLVPKTEICEEAEKPLIISERIQKADPQGPELGEACEKGNMLKRQRIKREKKDFRQVIVNDCHLPESFKEEENQKCKKSGGKYSLNSGAVKNPKTQLGQKPFTCSVCGKGFSQSANLVVHQRIHTGEKPFECHECGKAFIQSANLVVHQRIHTGQKPYVCSKCGKAFTQSSNLTVHQKIHSLEKTFKCNECEKAFSYSSQLARHQKVHITEKCYECNECGKTFTRSSNLIVHQRIHTGEKPFACNDCGKAFTQSANLIVHQRSHTGEKPYECKECGKAFSCFSHLIVHQRIHTAEKPYDCSECGKAFSQLSCLIVHQRIHSGDLPYVCNECGKAFTCSSYLLIHQRIHNGEKPYTCNECGKAFRQRSSLTVHQRTHTGEKPYECEKCGAAFISNSHLMRHHRTHLVE

SEQ ID NO: 16116 - protein, 532 aa, Homo sapiens
MIQAQESITLEDVAVDFTWEEWQLLGAAQKDLYRDVMLENYSNLVAVGYQASKPDALFKLEQGEQLWTIEDGIHSGACSDIWKVDHVLERLQSESLVNRRKPCHEHDAFENIVHCSKSQFLLGQNHDIFDLRGKSLKSNLTLVNQSKGYEIKNSVEFTGNGDSFLHANHERLHTAIKFPASQKLISTKSQFISPKHQKTRKLEKHHVCSECGKAFIKKSWLTDHQVMHTGEKPHRCSLCEKAFSRKFMLTEHQRTHTGEKPYECPECGKAFLKKSRLNIHQKTHTGEKPYICSECGKGFIQKGNLIVHQRIHTGEKPYICNECGKGFIQKTCLIAHQRFHTGKTPFVCSECGKSCSQKSGLIKHQRIHTGEKPFECSECGKAFSTKQKLIVHQRTHTGERPYGCNECGKAFAYMSCLVKHKRIHTREKQEAAKVENPPAERHSSLHTSDVMQEKNSANGATTQVPSVAPQTSLNISGLLANRNVVLVGQPVVRCAASGDNRGFAQDRNLVNAVNVVVPSVINYVLFYVTENP

SEQ ID NO: 16117 - protein, 605 aa, Homo sapiens
MAAGQREARPQVSLTFEDVAVLFTRDEWRKLAPSQRNLYRDVMLENYRNLVSLGLPFTKPKVISLLQQGEDPWEVEKDGSGVSSLGSKSSHKTTKSTQTQDSSFQGLILKRSNRNVPWDLKLEKPYIYEGRLEKKQDKKGSFQIVSATHKKIPTIERSHKNTELSQNFSPKSVLIRQQILPREKTPPKCEIQGNSLKQNSQLLNQPKITADKRYKCSLCEKTFINTSSLRKHEKNHSGEKLFKCKECSKAFSQSSALIQHQITHTGEKPYICKECGKAFTLSTSLYKHLRTHTVEKSYRCKECGKSFSRRSGLFIHQKIHAEENPCKYNPGRKASSCSTSLSGCQRIHSRKKSYLCNECGNTFKSSSSLRYHQRIHTGEKPFKCSECGRAFSQSASLIQHERIHTGEKPYRCNECGKGFTSISRLNRHRIIHTGEKFYNCNECGKALSSHSTLIIHERIHTGEKPCKCKVCGKAFRQSSALIQHQRMHTGERPYKCNECGKTFRCNSSLSNHQRIHTGEKPYRCEECGISFGQSSALIQHRRIHTGEKPFKCNTCGKTFRQSSSRIAHQRIHTGEKPYECNTCGKLFNHRSSLTNHYKIHIEEDP

SEQ ID NO: 16118 - protein, 612 aa, Homo sapiens
MAAGQREARPQVSLTFEDVAVLFTWDEWRKLAPSQRNLYRDVMLENYRNLVSLGLSFTKPKVISLLQQGEDPWEVEKDSSGVSSLGCKSTPKMTKSTQTQDSFQEQIRKRLKRDEPWNFISERSCIYEEKLKKQQDKNENLQIISVAHTKILTVDRSHKNVEFGQNFYLKSVFIKQQRFAKEKTPSKCEIQRNSFKQNSNLLNQSKIKTAEKRYKCSTCEKAFIHNSSLRKHQKNHTGEKLFKCKECLKAFSQSSALIQHQRTHTGEKPYICKECGKAFSHSASLCKHLRTHTVEKCYRCKECGKSFSRRSGLFIHQKIHAQENPHKYNPGRKASSYSTSLSGSQKIHLRKKSYLCNECGNTFKSSSSLRYHQRIHTGEKPFKCSECGRAFSQSASLIQHERIHTGEKPYRCNECGKGFTSISRLNRHRIIHTGEKLYNCNECGKALSSHSTLIIHERIHTGEKPCKCKVCGKAFRQSSALIQHQRMHTGERPYKCNECDKTFRCNSSLSNHQRIHTGEKPYRCLECGMSFGQSAALIQHQRIHTGEKPFKCNTCGKTFRQSSSLIAHQRIHTGEKPYECNACGKLFSQRSSLTNHYKIHIEEDSLKADLHV

SEQ ID NO: 16119 - protein, 554 aa, Homo sapiens [sequence omitted]

SEQ ID NO: 16120 - protein, 428 aa, Homo sapiens
MRDEVAEKEKADINVTLVFQGYENTPIMVCVDGIVFSKPDLVTCLEQRKKPWSMKHPGLTQHNIVHTGDKPYKCKDCGKIFKWSSNLTIHQRIHSGEKPYKCEECGKAFKQSSKLNEHMRAHTGEKFYKCEECGKAFKHPSGLTLHKRIHTGENPYKFEECDKAFYWVLSFTKHMIIHRGEKPYKYQECGKAFKWSSNLTIHKRIHTGEKPCKCEECGKACKQSLGLTIQKRIHTEEKPYKCEECGSSNLTIYKKIHAGEKPYNCEKCGKAFYCSSNLIQNNIVHAEEKHYKCQECGKAFKKSLDLNVHKIIHSGEKPYRYEECGKITHSGEESYKCEECGKGFYCSSSLTKHMIVHTEEKLYKCEECGKAFKWSSELTIHQRIRTEEKPYKCEECVRVFKHSSKLNEHKRNHTGEKPYKCEACGKAF

SEQ ID NO: 16121 - protein, 568 aa, Homo sapiens
MRRSVLVRNPGHKGLRPVYEELDSDSEDLDPNPEDLDPVSEDPEPDPEDLNTVPEDVDPSYEDLEPVSEDLDPDAEAPGSEPQDPDPMSSSFDLDPDVIGPVPLILDPNSDTLSPGDPKVDPISSGLTATPQVLATSPAVLPAPASPPRPFSCPDCGRAFRRSSGLSQHRRTHSGEKPYRCPDCGKSFSHGATLAQHRGIHTGARPYQCAACGKAFGWRSTLLKHRSSHSGEKPHHCPVCGKAFGHGSLLAQHLRTHGGPRPHKCPVCAKGFGQGSALLKHLRTHTGERPYPCPQCGKAFGQSSALLQHQRTHTAERPYRCPHCGKAFGQSSNLQHHLRIHTGERPYACPHCSKAFGQSSALLQHLHVHSGERPYRCQLCGKAFGQASSLTKHKRVHEGAAAAAAAAAAAAAAAAAGLGLGPGLSPASMMRPGQVSLLGPDAVSVLGSGLGLSPGTSSGRNPDPGSGPGTLPDPSSKPLPGSRSTPSPTPVESSDPKAGHDAGPDLVPSPDLDPVPSPDPDPVPSPDPNPVSCPDPCSPTRGTVSPALPTGESPEWVQEQGALLGPDG

SEQ ID NO: 16122 - protein, 420 aa, Homo sapiens
MSRSSPSGKGHSRMAEPRFNNPYFWPPPPTMPSQLDNLVLINKIKEQLMAEKIRPPHLPPTSASSQQPLLVPPAPAESSQAVMSLPKLQQVPGLHPQAVPQPDVALHARPATSTVTGLGLSTRTPSVSTSESSAGAGTGTGTSTPSTPTTTSQSRLIASSPTLISGITSPPLLDSIKTIQGHGLLGPPKSERGRKKIKAENPGGPPVLVVPYPILASGETAKEGKTYRCKVCPLTFFTKSEMQIHSKSHTEAKPHKCPHCSKSFANASYLAQHLRIHLGVKPYHCSYCDKSFRQLSHLQQHTRIHTGDRPYKCPHPGCEKAFTQLSNLQSHQRQHNKDKPYKCPNCYRAYSDSASLQIHLSAHAIKHAKAYCCSMCGRAYTSETYLMKHMSKHTVVEHLVSHHSPQRTESPGIPVRISLI

SEQ ID NO: 16123 - protein, 216 aa, Homo sapiens
MSALGQITITVSRCWNTERNQTDKNPCLHGAYLQLRETVKNKSTHLKKPLMKQAPPWKDHLTFQPLHPAERKTQVWRWQSGNSSDLETTSSASPWPTGSNRDVVLNTLAESCCGLSELITAPPYAGVSIQGFSQIWVLFPFCGGTFHHNEKDVLGLQDFERESVSTSQSRNISLLTLGQLQNCVIGKLTIIDLLTEHLLGVRHGVICFPWGLPSSS

SEQ ID NO: 16124 - protein, 407 aa, Homo sapiens
MQQKAFEESRYPWQESFENVAVCLPLRCPRCGDHTRFRSLSSLRAHLEFSHSYEERTLLTKCSLFPSLKDTDLVTSSELLKPGKLQSSGNVVKQKPSYVNLYSISHEHSKDRKPFEVVAERPVSYVQTYTAMDLHADSLDGTRSGPGLPTSDTKASFEAHVREKFNRMVEAVDRTIEKRIDKLTKELAQKTAELLEVRAAFVQLTQKKQEVQRRERALNRQVDVAVEMIAVLRQRLTESEEELLRKEEEVVTFNHFLEAAAEKEVQGKARLQDFIENLLQRVELAEKQLEYYQSQQASGFVRDLSGHVLTDISSNRKPKCLSRGHPHSVCNHPDLKAHFHPKGRNHLKKAKDDRASMQPAKAIHEQAESSRDLCRPPKKGELLGFGRKGNIRPKMAKKKPTAIVNII

SEQ ID NO: 16125 - protein, 744 aa, Homo sapiens
MQKEMKMIKDEDVHFDLAVKKTPSFPHCLQPVASRGKAPQRHPFPEALRGPFSQFRYEPPPGDLDGFPGVFEGAGSRKRKSMPTKMPYNHPAEEVTLALHSEENKNHGLPNLPLLFPQPPRPKYDSQMIDLCNVGFQFYRSLEHFGGKPVKQEPIKPSAVWPQPTPTPFLPTPYPYYPKVHPGLMFPFFVPSSSPFPFSRHTFLPKQPPEPLLPRKAEPQESEETKQKVERVDVNVQIDDSYYVDVGGSQKRWQCPTCEKSYTSKYNLVTHILGHSGIKPHACTHCGKLFKQLSHLHTHMLTHQGTRPHKCQVCHKAFTQTSHLKRHMMQHSEVKPHNCRVCGRGFAYPSELKAHEAKHASGRENICVECGLDFPTLAQLKRHLTTHRGPIQYNCSECDKTFQYPSQLQNHMMKHKDIRPYICSECGMEFVQPHHLKQHSLTHKGVKEHKCGICGREFTLLANMKRHVLIHTNIRAYQCHLCYKSFVQKQTLKAHMIVHSDVKPFKCKLCGKEFNRMHNLMGHMHLHSDSKPFKCLYCPSKFTLKGNLTRHMKVKHGVMERGLHSQGLGRGRIALAQTAGVLRSLEQEEPFDLSQKRRAKVPVFQSDGESAQGSHCHEEEEEDNCYEVEPYSPGLAPQSQQLCTPEDLSTKSEHAPEVLEEACKEEKEDASKGEWEKRSKGDLGAEGGQERDCAGRDECLSLRAFQSTRRGPSFSDYLYFKHRDESLKELLERKMEKQAVLLGI

SEQ ID NO: 16126 - protein, 350 aa, Homo sapiens
MIRGFEAPMAENPPPPPPPVIFCHDSPKRVLVSVIRTTPIKPTCGGGGEPEPPPPLIPTSPGFSDFMVYPWRWGENAHNVTLSPGAAGAAASAALPAAAAAEHSGLRGRGAPPPAASASAAASGGEDEEEASSPDSGHLKDGIRRGRPRADTVRDLINEGEHSSSRIRCNICNRVFPREKSLQAHKRTHTGERPYLCDYPDCGKAFVQSGQLKTHQRLHTGEKPFVCSENGCLSRFTHANRHCPKHPYARLKREEPTDTLSKHQAADNKAAAEWLARYWEMREQRTPTLKGKLVQKADQEQQDPLEYLQSDEEDDEKRGAQRRLQEQRERLHGALALIELANLTGAPLRQ

SEQ ID NO: 16127 - protein, 561 aa, Homo sapiens
MITSQGSVSFRDVTVGFTQEEWQHLDPAQRTLYRDVMLENYSHLVSVGYCIPKPEVILKLEKGEEPWILEEKFPSQSHLELINTSRNYSIMKFNEFNKGGKCFCDEKHEIIHSEEEPSEYNKNGNSFWLNEDLIWHQKIKNWEQSFEYNECGKAFPENSLFLVHKRGYTGQKTCKYTEHGKTCDMSFFITHQQTHPRENHYGNECGENIFEESILLEHQSVYPFSQKLNLTPIQRTHSINNIIEYNECGTFFSEKLVLHLQQRTHTGEKPYECHECGKTFTQKSAHTRHQRTHTGGKPYECHECGKTFYKNSDLIKHQRIHTGERPYGCHECGKSFSEKSTLTQHQRTHTGEKPYECHECGKTFSFKSVLTVHQKTHTGEKPYECYACGKAFLRKSDLIKHQRIHTGEKPYECNECGKSFSEKSTLTKHLRTHTGEKPYECIQCGKFFCYYSGFTEHLRRHTGEKPFGCNECGKTFRQKSALIVHQRTHIRQKPYGCNQCGKSFCVKSKLIAHHRTHTGEKPYECNVCGKSFYVKSKLTVHQRIHLGRNPINVVNEGNYSG

SEQ ID NO: 16128 - protein, 550 aa, Homo sapiens
MPLQGSVSFKDVTVDFTQEEWQQLDPAQKALYRDVMLENYCHFVSVGFHMAKPDMIRKLEQGEELWTQRIFPSYSYLEEDGKTEDVLVKFKEYQDRHSRPLIFINHKKLIKERSNIYGKTFTLGKNRISKTILCEYKPDGKVLKNISELVIRNISPIKEKFGDSTGWEKSLLNTKHEKIHPAVNLHKQTERVLSGKQELIQHQKVQAPEQPFDHNECEKSFLMKGMLFTHTRAHRGERTFEYNKDGIAFIEKSSLSVHPSNLMEKKPSAYNKYGKFLCRKPVFIMPQRPQTEEKPFHCPYCGNNFRRKSYLIEHQRIHTGEKPYVCNQCGKAFRQKTALTLHEKTHIEGKPFICIDCGKSFRQKATLTRHHKTHTGEKAYECPQCGSAFRKKSYLIDHQRTHTGEKPYQCNECGKAFIQKTTLTVHQRTHTGEKPYICNECGKSFCQKTTLTLHQRIHTGEKPYICNECGKSFRQKAILTVHHRIHTGEKSNGCPQCGKAFSRKSNLIRHQKTHTGEKPYECKQCGKFFSCKSNLIVHQKTHKVETTGIQ

SEQ ID NO: 16129 - protein, 475 aa, Homo sapiens
MAEGSVMFSDVSIDFSQEEWDCLDPVQRDLYRDVMLENYGNLVSMGLYTPKPQVISLLEQGKEPWMVGRELTRGLCSDLESMCETKLLSLKKEVYEIELCQREIMGLTKHGLEYSSFGDVLEYRSHLAKQLGYPNGHFSQEIFTPEYMPTFIQQTFLTLHQIINNEDRPYECKKCGKAFSQNSQFIQHQRIHIGEKSYECKECGKFFSCGSHVTRHLKIHTGEKPFECKECGKAFSCSSYLSQHQRIHTGKKPYECKECGKAFSYCSNLIDHQRIHTGEKPYECKVCGKAFTKSSQLFQHARIHTGEKPYECKECGKAFTQSSKLVQHQRIHTGEKPYECKECGKAFSSGSALTNHQRIHTGEKPYDCKECGKAFTQSSQLRQHQRIHAGEKPFECLECGKAFTQNSQLFQHQRIHTDEKPYECNECGKAFNKCSNLTRHLRIHTGEKPYNCKECGKAFSSGSDLIRHQGIHTNK

SEQ ID NO: 16130 - protein, 577 aa, Homo sapiens
MEESHFNSNPYFWPSIPTVSGQIENTMFINKMKDQLLPEKGCGLAPPHYPTLLTVPASVSLPSGISMDTESKSDQLTPHSQASVTQNITVVPVPSTGLMTAGVSCSQRWRREGSQSRGPGLVITSPSGSLVTTASSAQTFPISAPMIVSALPPGSQALQVVPDLSKKVASTLTEEGGGGGGGGGSVAPKPPRGRKKKRMLESGLPEMNDPYVLSPEDDDDHQKDGKTYRCRMCSLTFYSKSEMQIHSKSHTETKPHKCPHCSKTFANSSYLAQHIRIHSGAKPYSCNFCEKSFRQLSHLQQHTRIHSKMHTETIKPHKCPHCSKTFANTSYLAQHLRIHSGAKPYNCSYCQKAFRQLSHLQQHTRIHTGDRPYKCAHPGCEKAFTQLSNLQSHRRQHNKDKPFKCHNCHRAYTDAASLEVHLSTHTVKHAKVYTCTICSRAYTSETYLMKHMRKHNPPDLQQQVQAAAAAAAVAQAQAQAQAQAQAQAQAQAQAQASQASQQQQQQQQQQQQQQQQPPPHFQSPGAAPQGGGGGDSNPNPPPQCSFDLTPYKTAEHHKDICLTVTTSTIQVEHLASS

SEQ ID NO: 16131 - protein, 386 aa, Homo sapiens
MILGSLSRAGPLPLLRQPPIMQPPLDLKQILPFPLEPAPTLGLFSNYSTMDPVQKAVLSHTFGGPLLKTKRPVISCNICQIRFNSQSQAEAHYKGNRHARRVKGIEAAKTRGREPGVREPGDPAPPGSTPTNGDGVAPRPVSMENGLGPAPGSPEKQPGSPSPPSIPETGQGVTKGEGGTPAPASLPGGSKEEEEKAKRLLYCALCKVAVNSLSQLEAHNKGTKHKTILEARSGLGPIKAYPRLGPPTPGEPEAPAQDRTFHCEICNVKVNSEVQLKQHISSRRHRDGVAGKPNPLLSRHKKSRGAGELAGTLTFSKELPKSLAGGLLPSPLAVAAVMAAAAGSPLSLRPAPAAPLLQGPPITHPLLHPAPGPIRTAHGPILFSPY

SEQ ID NO: 16132 - protein, 471 aa, Homo sapiens
MNMANFLRGFEEKGIKNDRPEDQLSKEKKKILFSFCEVCNIQLNSAAQAQVHSNGKSHRKRVKQLSDGQPPPPAQASPSSNSSTGSTCHTTTLPALVRTPTLMMQPSLDIKPFMSFPVDSSSAVGLFPNFNTMDPVQKAVINHTFGVSIPPKKKQVISCNVCQLRFNSDSQAEAHYKGSKHAKKVKALDATKNKPKMVPSKDSAKANPSCSITPITGNNSDKSEDKGKLKASSSSQPSSSESGSFLLKSGTTPLPPGAATSPSKSTNGAPGTVVESEEEKAKKLLYCSLCKVAVNSLSQLEAHNTGSKHKTMVEARNGAGPIKSYPRPGSRLKMQNGSKGSGLQNKTFHCEICDVHVNSEIQLKQHISSRRHKDRVAGKPLKPKYSPYNKLQRSPSILAAKLAFQKDMMKPLAPAFLSSPLAAAAAVSSALSLPPRPSASLFQAPAIPPALLRPGHGPIRATPASILFAPY

SEQ ID NO: 16133 - protein, 424 aa, Homo sapiens
MGLAAGPASGAPSPLLASLPLPTRPLQPPLDFKHLLAFHFNGAAPLSLFPNFSTMDPVQKAVISHTFGVPSPLKKKLFISCNICHLRFNSANQAEAHYKGHKHARKLKAVEAAKSKQRPHTQAQDGAVVSPIPTLASGAPGEPQSKVPAAPPLGPPLQPPPTPDPTCREPAHSELLDAASSSSSSSCPPCSPEPGREAPGPEPAAAAVGSSMSGEGRSEKGHLYCPTCKVTVNSASQLQAHNTGAKHRWMMEGQRGAPRRSRGRPVSRGGAGHKAKRVTGGRGGRQGPSPAFHCALCQLQVNSETQLKQHMSSRRHKDRLAGKTPKPSSQHSKLQKHAALAVSILKSKLALQKQLTKTLAARFLPSPLPTAATAICALPGPLALRPAPTAATTLFPAPILGPALFRTPAGAVRPATGPIVLAPY

SEQ ID NO: 16134 - protein, 395 aa, Homo sapiens
MRNIMYFGGTCQSPALPALVRPPAPPLQPSLDIKPFLPFPLDTAAAVNLFPNFNAMDPIQKAVINHTFGVPLPHRRKQIISCNICQLRFNSDSQAAAHYKGTKHAKKLKALEAMKNKQKSVTAKDSAKTTFTSITTNTINTSSDKTDGTAGTPAISTTTTVEIRKSSVMTTEITSKVEKSPTTATGNSSCPSTETEEEKAKRLLYCSLCKVAVNSASQLEAHNSGTKHKTMLEARNGSGTIKAFPRAGVKGKGPVNKGNTGLQNKTFHCEICDVHVNSETQLKQHISSRRHKDRAAGKPPKPKYSPYNKLQKTAHPLGVKLVFSKEPSKPLAPRILPNPLAAAAAAAAVAVSSPFSLRTAPAATLFQTSALPPALLRPAPGPIRTAHTPVLFAPY

SEQ ID NO: 16135 - protein, 358 aa, Homo sapiens
MESLRGNTAQGPTNEEDYKNEGQLSRQTKCPAQKKSSFENTVVRKVSVTLKEIFTGEEGPESSEFSLSPNLDAQQKIPKGHGSPISRKNSKDNSDLIKHQRLFSQRKPCKCNECEKAFSYQSDLLVHSRIHGGEKPFECNKCGKSFSRSTHLIEHQRTHTGEKPYECNECGKAFSRSTHLSLHQRIHTGEKPYECSECGKAFSRSTNLSQHQRTHTQERPYKCNECGKAFGDRSTIIQHQRIHTGENPYECSKCGKAFSWISSLTEHQRTHTGENPYECSECGKVFSRSSSLTEHQRIHSGEKPHECRVCGKGFSRSSSLIIHQRTHTGEKPYKCNDCGKAFCQSSTLIRHQHLHTKE

SEQ ID NO: 16136 - protein, 561 aa, Homo sapiens
MNSSLTAQRRGSDAELGPWVMAARSKDAAPSQRDGLLPVKVEEDSPGSWEPNYPAASPDPETSRLHFRQLRYQEVAGPEEALSRLRELCRRWLRPELLSKEQILELLVLEQFLTILPEELQAWVREHCPESGEEAVAVVRALQRALDGTSSQGMVTFEDTAVSLTWEEWERLDPARRDFCRESAQKDSGSTVPPSLESRVENKELIPMQQILEEAEPQGQLQEAFQGKRPLFSKCGSTHEDRVEKQSGDPLPLKLENSPEAEGLNSISDVNKNGSIEGEDSKNNELQNSARCSNLVLCQHIPKAERPTDSEEHGNKCKQSFHMVTWHVLKPHKSDSGDSFHHSSLFETQRQLHEERPYKCGNCGKSFKQRSDLFRHQRIHTGEKPYGCQECGKSFSQSAALTKHQRTHTGEKPYTCLKCGERFRQNSHLNRHQSTHSRDKHFKCEECGETCHISNLFRHQRLHKGERPYKCEECEKSFKQRSDLFKHHRIHTGEKPYGCSVCGKRFNQSATLIKHQRIHTGEKPYKCLECGERFRQSTHLIRHQRIHQNKVLSAGRGGSRL

SEQ ID NO: 16137 - protein, 513 aa, Homo sapiens
MASVLSRRLGKRSLLGARVLGPSASEGPSAAPPSEPLLEGAAPQPFTTSDDTPCQEQPKEVLKAPSTSGLQQVAFQPGQKVYVWYGGQECTGLVEQHSWMEGQVTVWLLEQKLQVCCRVEEVWLAELQGPCPQAPPLEPGAQALAYRPVSRNIDVPKRKSDAVEMDEMMAAMVLTSLSCSPVVQSPPGTEANFSASRAACDPWKESGDISDSGSSTTSGHWSGSSGVSTPSPPHPQASPKYLGDAFGSPQTDHGFETDPDPFLLDEPAPRKRKNSVKVMYKCLWPNCGKVLRSIVGIKRHVKALHLGDTVDSDQFKREEDFYYTEVQLKEESAAAAAAAAAGTPVPGTPTSEPAPTPSMTGLPLSALPPPLHKAQSSGPEHPGPESSLPSGALSKSAPGSFWHIQADHAYQALPSFQIPVSPHIYTSVSWAAAPSAACSLSPVRSRSLSFSEPQQPAPAMKSHLIVTSPPRAQSGARKARGEAKKCRKVYGIEHRDQWCTACRWKKACQRFLD

SEQ ID NO: 16138 - protein, 335 aa, Homo sapiens
MSAKLGKSSSLLTQTSEECNGILTEKMEEEEQTCDPDSSLHWSSSYSPETFRQQFRQFGYQDSPGPHEALSRLWELCHLWLRPEVHTKEQILELLVLEQFLAILPKELQAWVQKHHPENGEETVTMLEDVERELDGPKQIFFGRRKDMIAEKLAPSEITEELPSSQLMPVKKQLQGASWELQSLRPHDEDIKTTNVKSASRQKTSLGIELHCNVSNILHMNGSQSSTYRGTYEQDGRFEKRQGNPSWKKQQKCDECGKIFSQSSALILHQRIHSGKKPYACDECAKAFSRSAILIQHRRTHTGEKPYKCHDCGKAFSQSSNLFRHRKRHIRKKVP

SEQ ID NO: 16139 - protein, 534 aa, Homo sapiens
MAVESGVISTLIPQDPPEQELILVKVEDNFSWDEKFKQNGSTQSCQELFRQQFRKFCYQETPGPREALSRLQELCYQWLMPELHTKEQILELLVLEQFLSILPEELQIWVQQHNPESGEEAVTLLEDLEREFDDPGQQVPASPQGPAVPWKDLTCLRASQESTDIHLQPLKTQLKSWKPCLSPKSDCENSETATKEGISEEKSQGLPQEPSFRGISEHESNLVWKQGSATGEKLRSPSQGGSFSQVIFTNKSLGKRDLYDEAERCLILTTDSIMCQKVPPEERPYRCDVCGHSFKQHSSLTQHQRIHTGEKPYKCNQCGKAFSLRSYLIIHQRIHSGEKAYECSECGKAFNQSSALIRHRKIHTGEKACKCNECGKAFSQSSYLIIHQRIHTGEKPYECNECGKTFSQSSKLIRHQRIHTGERPYECNECGKAFRQSSELITHQRIHSGEKPYECSECGKAFSLSSNLIRHQRIHSGEEPYQCNECGKTFKRSSALVQHQRIHSGDEAYICNECGKAFRHRSVLMRHQRVHTIK

SEQ ID NO: 16140 - protein, 642 aa, Homo sapiens
MAEAAPAPTSEWDSECLTSLQPLPLPTPPAANEAHLQTAAISLWTVVAAVQAIERKVEIHSRRLLHLEGRTGTAEKKLASCEKTVTELGNQLEGKWAVLGTLLQEYGLLQRRLENLENLLRNRNFWILRLPPGIKGDIPKVPVAFDDVSIYFSTPEWEKLEEWQKELYKNIMKGNYESLISMDYAINQPDVLSQIQPEGEHNTEDQAGPEESEIPTDPSEEPGISTSDILSWIKQEEEPQVGAPPESKESDVYKSTYADEELVIKAEGLARSSLCPEVPVPFSSPPAAAKDAFSDVAFKSQQSTSMTPFGRPATDLPEASEGQVTFTQLGSYPLPPPVGEQVFSCHHCGKNLSQDMLLTHQCSHATEHPLPCAQCPKHFTPQADLSSTSQDHASETPPTCPHCARTFTHPSRLTYHLRVHNSTERPFPCPDCPKRFADQARLTSHRRAHASERPFRCAQCGRSFSLKISLLLHQRGHAQERPFSCPQCGIDFNGHSALIRHQMIHTGERPYPCTDCSKSFMRKEHLLNHRRLHTGERPFSCPHCGKSFIRKHHLMKHQRIHTGERPYPCSYCGRSFRYKQTLKDHLRSGHNGGCGGDSDPSGQPPNPPGPLITGLETSGLGVNTEGLETNQWYGEGSGGGVL

SEQ ID NO: 16141 - protein, 552 aa, Homo sapiens
MARVPLTFSDVAIDFSQEEWEYLNSDQRDLYRDVMLENYTNLVSLDFNFTTESNKLSSEKRNYEVNAYHQETWKRNKTFNLMRFIFRTDPQYTIEFGRQQRPKVGCFSQMIFKKHKSLPLHKRNNTREKSYECKEYKKGFRKYLHLTEHLRDHTGVIPYECNECGKAFVVFQHFIRHRKIHTDLKPYECNGCEKAFRFYSQLIQHQIIHTGMKPYECKQCGKAFRRHSHLTEHQKIHVGLKPFECKECGETFRLYRHMCLHQKIHHGVKPYKCKECGKAFGHRSSLYQHKKIHSGEKPYKCEQCEKAFVRSYLLVEHQRSHTGEKPHECMECGKAFGKGSSLLKHKRIHSSEKLYDCKDCGKAFCRGSQLTQHQRIHTGEKPHECKECGKTFKLHSYLIQHQIIHTDLKPYECKQCGKAFSRVGDLKTHQSIHAGEKPYECKECGKTFRLNSQLIYHQTIHTGLKPYVCKECKKAFRSISGLSQHKRIHTGEKPYECKECDKAFNRSDRLTQHETIHTGVKPQKCKECGKAFSHCYQLSQHQRFHHGERLLM

SEQ ID NO: 16142 - protein, 2248 aa, Homo sapiens
MMDSENKPENDEDEKINKEAQDLTKLSSHNEDGGPVSDVIASFPENSMGKRGFSESSNSDSVVIGEDRNKHASKRRKLDEAEPLKSGKQGICRLETSESSVTEGGIALDETGKETFLSDCTVGGTCLPNALSPSCNFSTIDVVSLKTDTEKTSAQEMVSLDLERESPFPPKEISVSCTIGNVDTVLKCSICGHLFSSCSDLEKHAESHMQQPKEHTCCHCSHKAESSSALHMHIKQAHGPQKVFSCDLCGFQCSEENLLNAHYLGKTHLRRQNLAARGGFVQILTKQPFPKKSRTMATKNVHSKPRTSKSIAKNSDSKGLRNVGSTFKDFRGSISKQSGSSSELLVEMMPSRNTLSQEVEIVEEHVTSLGLAQNPENQSRKLDTLVTSEGLLEKLESTKNTLQAAHGNSVTSRPRPERNILVLGNSFRRRSSTFTLKGQAKKRFNLLGIKRGTSETQRMYMKHLRTQMKTHDAESVLKHLEACSSVQRVCVTTSETQEAEQGQGSARPPDSGLHSLTVKPASGSQTLCACTDCGQVATNRTDLEIHVKRCHAREMKFYCRTCDFSSMSRRDLDEHLHSNQHQQTASVLSCQCCSFISLDEINLRDHMKEKHNMHFLCTPCNLFFLSEKDVEEHKATEKHINSLVQPKTLQSSNSDLVLQTLPLSTLESENAKESMDDSGKASQEEPLKSRVSHGNEVRHSSKPQFQCKKCFYKTRSSTVLTRHIKLRHGQDYHFLCKACNLYSLSKEGMEKHIKRSKHLENAKKNNIGLSFEECIERVCIGANDKKEEFDVSGNGRIEGHIGVQLQEHSYLEKGMLASEELSQSGGSTKDDELASTTTPKRGRPKGNISRTCSHCGLLASSITNLTVHIRRKHSHQYSYLCKVCKYYTVTKGDMERHCATKKHKGRVEIEASGKHSSDIIVGPEGGSLEAGKKNAGSAVTMSDEHANKPAESPTSVLEKPDRGNSIEAEVENVFHSLDGEVNSHLLDKKEQISSEPEDFAQPGDVYSQRDVTGTGENKCLHCEFSAHSSASLELHVKRKHTKEFEFYCMACDYYAVTRREMTRHAATEKHKMKRQSYLNSANVEAGSADMSKNIIMPEEEHQQNSEEFQIISGQPSDTLKSRNAADCSILNENTNLDMSKVLCAADSVEVETEEESNFNEDHSFCETFQQAPVKDKVRKPEEMMSLTMSSNYGSPSRFQNENSGSSALNCETAKKNHEISNDAGELRVHCEGEGGNAGDGGGVVPHRHLCPVTLDGERSAESPVLVVTRITREQGNLESGGQNRVARGHGLEDLKGVQEDPVLGNKEILMNSQHETEFILEEDGPASDSTVESSDVYETIISIDDKGQAMYSFGRFDSSIIRIKNPEDGELIDQSEEGLIATGVRISELPLKDCAQGVKKKKSEGSSIGESTRIRCDDCGFLADGLSGLNVHIAMKHPTKEKHFHCLLCGKSFYTESNLHQHLASAGHMRNEQASVEELPEGGATFKCVKCTEPFDSEQNLFLHIKGQHEELLREVNKYIVEDTEQINREREENQGNVCKYCGKMCRSSNSMAFLAHIRTHTGSKPFKCKICHFATAQLGDARNHVKRHLGMREYKCHVCGVAFVMKKHLNTHLLGKHGVGTPKERKFTCHLCDRSFTEKWALNNHMKLHTGEKPFKCTWPTCHYSFLTASAMKDHYRTHTGEKSFLCDLCGFAGGTRHALTKHRRQHTGEKPFKCDECNFASTTQSHLTRHKRVHTGEKPYRCPWCDYRSNCAENIRKHILHTGKHEGVKMYNCPKCDYGTNVPVEFRNHLKEQHPDIENPDLAYLHAGIVSKSYECRLKGQGATFVETDSPFTAAALAEEPLVKEKPLRSSRRPAPPPEQVQQVIIFQGYDGEFALDPSVEETAAATLQTLAMAGQVARVVHITEDGQVIATSQSGAHVGSVVPGPILPEQLADGATQVVVVGGSMEGHGMDESLSPGGAVIQQVTKQEILNLSEAGVAPPEASSALDALLCAVTELGEVEGRAGLEEQGRPGAKDVLIQLPGQEVSHVAADPEAPEIQMFPQAQESPAAVEVLTQVVHPSAAMASQERAQVAFKKMVQGVLQFAVCDTAAAGQLVKDGVTQVVVSEEGAVHMVAGEGAQIIMQEAQGEHMDLVESDGEISQIIVTEELVQAMVQESSGGFSEGTTHYILTELPPGVQDEPGLYSHTVLETADSQELLQAGATLGTEAGAPSRAEQLASVVIYTQEGSSAAAAIQSQRESSELQEA

SEQ ID NO: 16143 - protein, 720 aa, Homo sapiens
MEEAEELLLEGKKALQLAREPRLGLDLGWNPSGEGCTQGLKDVPPEPTRDILALKSLPRGLALGPSLAKEQRLGVWCVGDPLQPGLLWGPLEEESASKEKGEGVKPRQEENLSLGPWGDVCACEQSSGWTSLVQRGRLESEGNVAPVRISERLHLQVYQLVLPGSELLLWPQPSSEGPSLTQPGLDKEAAVAVVTEVESAVQQEVASPGEDAAEPCIDPGSQSPSGIQAENMVSPGLKFPTQDRISKDSQPLGPLLQDGDVDEECPAQAQMPPELQSNSATQQDPDGSGASFSSSARGTQPHGYLAKKLHSPSDQCPPRAKTPEPGAQQSGFPTLSRSPPGPAGSSPKQGRRYRCGECGKAFLQLCHLKKHAFVHTGHKPFLCTECGKSYSSEESFKAHMLGHRGVRPFPCPQCDKAYGTQRDLKEHQVVHSGARPFACDQCGKAFARRPSLRLHRKTHQVPAAPAPCPCPVCGRPLANQGSLRNHMRLHTGEKPFLCPHCGRAFRQRGNLRGHLRLHTGERPYRCPHCADAFPQLPELRRHLISHTGEAHLCPVCGKALRDPHTLRAHERLHSGERPFPCPQCGRAYTLATKLRRHLKSHLEDKPYRCPTCGMGYTLPQSLRRHQLSHRPEAPCSPPSVPSAASEPTVVLLQAEPQLLDTHREEEVSPARDVVEVTISESQEKCFVVPEEPDAAPSLVLIHKDMGLGAWAEVVEVEMGT

SEQ ID NO: 16144 - protein, 821 aa, Homo sapiens
MAANGDSPPWSPALAAEGRGSSCEVRRERTPEARIHSVKRYPDLSPGPKGRSSADHAALNSIVSLQASVSFEDVTVDFSKEEWQHLDPAQRRLYWDVTLENYSHLLSVGYQIPKSEAAFKLEQGEGPWMLEGEAPHQSCSGEAIGKMQQQGIPGGIFFHCERFDQPIGEDSLCSILEELWQDNDQLEQRQENQNNLLSHVKVLIKERGYEHKNIEKIIHVTTKLVPSIKRLHNCDTILKHTLNSHNHNRNSATKNLGKIFGNGNNFPHSPSSTKNENAKTGANSCEHDHYEKHLSHKQAPTHHQKIHPEEKLYVCTECVMGFTQKSHLFEHQRIHAGEKSRECDKSNKVFPQKPQVDVHPSVYTGEKPYLCTQCGKVFTLKSNLITHQKIHTGQKPYKCSECGKAFFQRSDLFRHLRIHTGEKPYECSECGKGFSQNSDLSIHQKTHTGEKHYECNECGKAFTRKSALRMHQRIHTGEKPYVCADCGKAFIQKSHFNTHQRIHTGEKPYECSDCGKSFTKKSQLHVHQRIHTGEKPYICTECGKVFTHRTNLTTHQKTHTGEKPYMCAECGKAFTDQSNLIKHQKTHTGEKPYKCNGCGKAFIWKSRLKIHQKSHIGERHYECKDCGKAFIQKSTLSVHQRIHTGEKPYVCPECGKAFIQKSHFIAHHRIHTGEKPYECSDCGKCFTKKSQLRVHQKIHTGEKPNICAECGKAFTDRSNLITHQKIHTREKPYECGDCGKTFTWKSRLNIHQKSHTGERHYECSKCGKAFIQKATLSMHQIIHTGKKPYACTECQKAFTDRSNLIKHQKMHSGEKRYKASD

SEQ ID NO: 16145 - protein, 478 aa, Homo sapiens
MLSDELESKPELLVQFVQNTSIPLGQGLVESEAKDITCLSLLPVTEASECSRLMLPDDTTNHSNSSKEVPSSAVLRSLRVNVGPDGEETRAQTVQKSPEFLSTSESSSLLQDLQPSDSTSFILLNLTRAGLGSSAEHLVFVQDEAEDSGNDFLSSESTDSSIPWFLRVQELAHDSLIAATRAQLAKNAKTSSNGENVHLGSGDGQSKDSGPLPQVEKKLKCTVEGCDRTFVWPAHFKYHLKTHRNDRSFICPAEGCGKSFYVLQRLKVHMRTHNGEKPFMCHESGCGKQFTTAGNLKNHRRIHTGEKPFLCEAQGCGRSFAEYSSLRKHLVVHSGEKPHQCQVCGKTFSQSGSRNVHMRKHHLQLGAAGSQEQEQTAEPLMGSSLLEEASVPSKNLVSMNSQPSLGGESLNLPNTNSILGVDDEVLAEGSPRSLSSVPDVTHHLVTMQSGRQSYEVSVLTAVNPQELLNQGDLTERRT

SEQ ID NO: 16146 - protein, 312 aa, Homo sapiens
MEEKPSGPIPDMLATAEPSSSETDKEVLSPAVPAAAPSSSMSEEPGPEQAATPPVWERGGAGGMQQGSSPAPDSCQPGPGPSPGLTSIVSGTSEDLRPPRRRPPPGKQIPCSSPGCCLSFPSVRDLAQHLRTHCPPTQSLEGKLFRCSALSCTETFPSMQELVAHSKLHYKPNRYFKCENCLLRFRTHRSLFKHLHVCAEHAQSPAPPPPPALDREPPAPERPPEVDPASAPGLPFPLLEPFTTPAPAPTGPFLPYLNPAPFGLSPPRLRPFLAAAPGPPASSAAVWKKSQGAGSSPRRPQGGSDAPSGACR

SEQ ID NO: 16147 - protein, 603 aa, Homo sapiens
MPELYTEDFIQGCDVGELQEPGLPGVLSYVGAQERALDHRKPSTSSKKTKRVEIDQRCENRLECNGAISAHCNLRLPDSNDSPASASRVAGITDLSRNCVIKELAPQQEGNPGEVFHTVTLEQHEKHDIEEFCFREIKKKIHDFDCQWRDDERNCNKVTTAPKENLTCRRDQRDRRGIGNKSIKHQLGLSFLPHPHELQQFQAEGKIYECNHVEKSVNHGSSVSPPQIISSTIKTHVSNKYGTDFICSSLLTQEQKSCIREKPYRYIECDKALNHGSHMTVRQVSHSGEKGYKCDLCGKVFSQKSNLARHWRVHTGEKPYKCNECDRSFSRNSCLALHRRVHTGEKPYKCYECDKVFSRNSCLALHQKTHIGEKPYTCKECGKAFSVRSTLTNHQVIHSGKKPYKCNECGKVFSQTSSLATHQRIHTGEKPYKCNECGKVFSQTSSLARHWRIHTGEKPYKCNECGKVFSYNSHLASHRRVHTGEKPYKCNECGKAFSVHSNLTTHQVIHTGEKPYKCNQCGKGFSVHSSLTTHQVIHTGEKPYKCNECGKSFSVRPNLTRHQIIHTGKKPYKCSDCGKSFSVRPNLFRHQIIHTKEKPYKRN

SEQ ID NO: 16148 - protein, 594 aa, Homo sapiens
MAAAVLRDSTSVPVTAEAKLMGFTQGCVTFEDVAIYFSQEEWGLLDEAQRLLYRDVMLENFALITALVCWHGMEDEETPEQSVSVEGVPQVRTPEASPSTQKIQSCDMCVPFLTDILHLTDLPGQELYLTGACAVFHQDQKHHSAEKPLESDMDKASFVQCCLFHESGMPFTSSEVGKDFLAPLGILQPQAIANYEKPNKISKCEEAFHVGISHYKWSQCRRESSHKHTFFHPRVCTGKRLYESSKCGKACCCECSLVQLQRVHPGERPYECSECGKSFSQTSHLNDHRRIHTGERPYVCGQCGKSFSQRATLIKHHRVHTGERPYECGECGKSFSQSSNLIEHCRIHTGERPYECDECGKAFGSKSTLVRHQRTHTGEKPYECGECGKLFRQSFSLVVHQRIHTTARPYECGQCGKSFSLKCGLIQHQLIHSGARPFECDECGKSFSQRTTLNKHHKVHTAERPYVCGECGKAFMFKSKLVRHQRTHTGERPFECSECGKFFRQSYTLVEHQKIHTGLRPYDCGQCGKSFIQKSSLIQHQVVHTGERPYECGKCGKSFTQHSGLILHRKSHTVERPRDSSKCGKPYSPRSNIV

SEQ ID NO: 16149 - protein, 575 aa, Homo sapiens
MAAAAPRRPTQQGTVTFEDVAVNFSQEEWCLLSEAQRCLYRDVMLENLALISSLGCWCGSKDEEAPCKQRISVQRESQSRTPRAGVSPKKAHPCEMCGLILEDVFHFADHQETHHKQKLNRSGACGKNLDDTAYLHQHQKQHIGEKFYRKSVREASFVKKRKLRVSQEPFVFREFGKDVLPSSGLCQEAAAVEKTDSETMHGPPFQEGKTNYSCGKRTKAFSTKHSVIPHQKLFTRDGCYVCSDCGKSFSRYVSFSNHQRDHTAKGPYDCGECGKSYSRKSSLIQHQRVHTGKTAYPCEECGKSFSQKGSLISHQRVHTGERPYECREYGKSFGQKGNLIQHQQGHTGERAYHCGECGKSFRQKFCFINHQRVHTGERPYKCGECGKSFGQKGNLVQHQRGHTGERPYECKECGKSFRYRSHLTEHQRLHTGERPYNCRECGKLFNRKYHLLVHERVHTGERPYACEVCGKLFGNKNCVTIHQRIHTGERPYECNECGKSFLSSSALHVHKRVHSGQKPYKCSECGKSFAECSSLIKHRRIHTGERPYECTKCGKTFQRSSTLLHHQSSHRRKAL

SEQ ID NO: 16150 - protein, 676 aa, Homo sapiens
MQGTVAFEDVAVNFSQEEWSLLSEVQRCLYHDVMLENWVLISSLGCWCGSEDEEAPSKKSISIQRVSQVSTPGAGVSPKKAHSCEMCGAILGDILHLADHQGTHHKQKLHRCEAWGNKLYDSSNRPHQNQYLGEKPYRSSVEEALFVKRCKFHVSEESSIFIQSGKDFLPSSGLLLQEATHTGEKSNSKPECESPFQWGDTHYSCGECMKHSSTKHVFVQQQRLPSREECYCWECGKSFSKYDSVSNHQRVHTGKRPYECGECGKSFSHKGSLVQHQRVHTGKRPYECGECGKSFSHKGSLVQHQRVHTGERPYECGECGKSFSQNGTLIKHQRVHTGERPYECEECGKCFTQKGNLIQHQRGHTSERPYECEECGKCFSQKGTLTEHHRVHTRERPYECGECGKSFSRKGHLRNHQRGHTGERPYECGECGKSFSRKGNLIQHQRSHTGERPYECRECRKLFRGKSHLIEHQRVHTGERPYECNECGKSFQDSSGFRVHQRVHTGEKPFECSECGKSFPQSCSLLRHRRVHTGERPYECGECGKSFHQSSSLLRHQKTHTAERPYECRECGKFFSSLLEHRRVHTGERPYECRECGKTFTRRSAHFKHQRLHTRGKPYECSECGKSFAETFSLTEHRRVHTGERPYECSECGKSFHRSSSLLRHQRVHTERSPYK

SEQ ID NO: 16151 - protein, 510 aa, Homo sapiens; identical to SEQ ID NO: 14420

SEQ ID NO: 16152 - protein, 688 aa, Homo sapiens
MARKLVMFRDVAIDFSQEEWECLDSAQRDLYRDVMLENYSNLVSLDLPSRCASKDLSPEKNTYETELSQWEMSDRLENCDLEESNSRDYLEAKGKMEKQQENQKEYFRQGMIIYDKMSIFNQHTYLSQHSRCHSTEKPYKCKECGKAFRRASHLTQHQSIHTGEKPYECKQCGKAFSRDSQLSLHQRLHTGEKPYACKECGKAFTQSSQLILHHRIHTGEKPYKCEECGKAFIRSSQLTRHQKVHTGEKPYECKECGKAFTQNSQLTLHQRLHTGEKLYECKECRKVFTQLSQLILHKRIHTGEKPYECKECGKAFICGSQLSQHQKIHNGEKPYECKECGRAFIRGSLLMQHQRIHTGEKPYKCEECGKAFIRGSQLTQHQRIHTNEKPYECKECGKMFSHGSQLTQHQRIHTGEKPYQCKECGKAFNRGSLLTRHQRIHTGEKPYECKECGKTFSRGSELTQHERIHTGEKPYECKECGKSFIRGSQLTQHQRIHTGEKPYECKECRMAFTQSSHLSQHQRLHTGEKPYVCNECGKAFARGLLLIQHQRIHTGEKPYQCKECGKAFIRGSQLTQHQRIHTGEKPYECKECGKAFSHGSQLTLHQRIHTGEKPYECRECRKAFTQSSHLSRHQRIHTGEKPYQCKECGKAFTRGSQLTQHQRIHISEKSFEYKECGIDFSHGSQVYM

SEQ ID NO: 16153 - protein, 1284 aa, Homo sapiens
MHKKRVEEGEASDFSLAWDSSVTAAGGLEGEPECDQKTSRALEDRNSVTSQEERNEDDEDMEDESIYTCDHCQQDFESLADLTDHRAHRCPGDGDDDPQLSWVASSPSSKDVASPTQMIGDGCDLGLGEEEGGTGLPYPCQFCDKSFIRLSYLKRHEQIHSDKLPFKCTYCSRLFKHKRSRDRHIKLHTGDKKYHCHECEAAFSRSDHLKIHLKTHSSSKPFKCTVCKRGFSSTSSLQSHMQAHKKNKEHLAKSEKEAKKDDFMCDYCEDTFSQTEELEKHVLTRHPQLSEKADLQCIHCPEVFVDENTLLAHIHQAHANQKHKCPMCPEQFSSVEGVYCHLDSHRQPDSSNHSVSPDPVLGSVASMSSATPDSSASVERGSTPDSTLKPLRGQKKMRDDGQGWTKVVYSCPYCSKRDFNSLAVLEIHLKTIHADKPQQSHTCQICLDSMPTLYNLNEHVRKLHKNHAYPVMQFGNISAFHCNYCPEMFADINSLQEHIRVSHCGPNANPSDGNNAFFCNQCSMGFLTESSLTEHIQQAHCSVGSAKLESPVVQPTQSFMEVYSCPYCTNSPIFGSILKLTKHIKENHKNIPLAHSKKSKAEQSPVSSDVEVSSPKRQRLSASANSISNGEYPCNQCDLKFSNFESFQTHLKLHLELLLRKQACPQCKEDFDSQESLLQHLTVHYMTTSTHYVCESCDKQFSSVDDLQKHLLDMHTFVLYHCTLCQEVFDSKVSIQVHLAVKHSNEKKMYRCTACNWDFRKEADLQVHVKHSHLGNPAKAHKCIFCGETFSTEVELQCHITTHSKKYNCKFCSKAFHAIILLEKHLREKHCVFDAATENGTANGVPPMATKKAEPADLQGMLLKNPEAPNSHEASEDDVDASEPMYGCDICGAAYTMEVLLQNHRLRDHNIRPGEDDGSRKKAEFIKGSHKCNVCSRTFFSENGLREHLQTHRGPAKHYMCPICGERFPSLLTLTEHKVTHSKSLDTGTCRICKMPLQSEEEFIEHCQMHPDLRNSLTGFRCVVCMQTVTSTLELKIHGTFHMQKLAGSSAASSPNGQGLQKLYKCALCLKEFRSKQDLVKLDVNGLPYGLCAGCMARSANGQVGGLAPPEPADRPCAGLRCPECSVKFESAEDLESHMQVDHRDLTPETSGPRKGTQTSPVPRKKTYQCIKCQMTFENEREIQIHVANHMIEEGINHECKLCNQMFDSPAKLLCHLIEHSFEGMGGTFKCPVCFTVFVQANKLQQHIFAVHGQEDKIYDCSQCPQKFFFQTELQNHTMSQHAQ

SEQ ID NO: 16154 - protein, 752 aa, Homo sapiens
MAEPASVTVTFDDVALYFSEQEWEILEKWQKQMYKQEMKTNYETLDSLGYAFSKPDLITWMEQGRMLLISEQGCLDKTRRTTSPPTDEQLNMKNTGKLLCFDDEGTPRTKEEDCRLNGPQKQDLCAALRGKERKILLAQTATFQSPSLRETEILNKKVSITAYDPDKKDLRHKPRETPGRLEIPTGPRCYSCYVCRKVFQVRRDLLKHKRSHSKSQLCRYPKYKNSSRGKSELRRTQRLLCQKKRFQCSECEKSYFLKGSLVTHQVVHTGQRPYPCPECDKTFRYRANLKKHLCLHRGERPFCCGECGRAFVQQCELTEHLRLHSGEKPFQCPQCDRCFRLKRGMKVHLTQHSGKRPFHCPECGRSFSRKAALKTHQRTHSEEKPFSCGECGRKFIYKIKLDEHIRVHTGEKPFSCPECNKSFRLKRSLKAHGLQHIGKRPFQCPECSRGFFWRNAMRAHQRLHSEQKPFPCAECGKRFTRPSKLACHTRVHDRQKEFPCGECKKTFSQQSRLTQHLKVHTTEKPFSCAECGRSFRRRAHLTEHTRLHSGEEPFQCPECDKSFSWKASMKFHQRMHRDEKPFACGECDKTYTHQSQLTEHLRLHSGEKPYQCPECEKTFRLKGNLKSHLLQHSGQKPFSCVMCGKSFTQQYRLTEHIRVHSGEKPFQCPECDKSYCIRGSLKVHLYKHSGERPFQCPECGKGFLQKRSLKAHLCLHSGERPFSCDECGRSFTYVGALKTHIAVHAKEKPSSL

SEQ ID NO: 16155 - protein, 554 aa, Homo sapiens
MAAADLSHGHYLSGDPVCLHEEKTPAGRIVADCLTDCYQDSVTFDDVAVDFTQEEWTLLDSTQRSLYSDVMLENYKNLATVGGQIIKPSLISWLEQEESRTVQGGVLQGWEMRLETQWSILQQDFLRGQTSIGIQLEGKHNGRELCDCEQCGEVFSEHSCLKTHVRTQSTGNTHDCNQYGKDFLTLCEKTSTGEKLSEFNQSEKIFSLTPNIVYQRTSTQEKSFECSHCGKSFINESYLQAHMRTHNGEKLYEWRNYGPGFIDSTSLSVLIETLNAKKPYKCKECGKGYRYPAYLSIHMRTHTGEKPYECKECGKAFNYSNSFQIHGRTHTGEKPYVCKECGKAFTQYSGLSMHVRSHSGDKPYECKECGKSFLTSSRLIQHIRTHTGEKPFVCVECGKAFAVSSNLSGHLRTHTEEKACECKICGKVFGYPSCLNNHMRTHSAQKPYTCKECGKAFNYSTHLKIHMRIHTGEKPYECKQCGKAFSHSSSFQIHERTHTGEKPYECKECGKAFTCSSSFRIHEKTHTEEKPYKCQQCGKAYSHPRSLRRHEQIH

SEQ ID NO: 16156 - protein, 188 aa, Homo sapiens
MTETREPAETGGYASLEEDDEDLSPGPEHSSDSEYTLSEPDSEEEEDEEEEEEETTDDPEYDPGYKVKQRLGGGRGGPSRRAPRAAQPPAQPCQLCGRSPLGEAPPGTPPCRLCCPATAPQEAPAPEGRALGEEEEEPPRAGEGRPAGREEEEEEEEEGTYHCTECEDSFDNLGELHGHFMLHARGEV

SEQ ID NO: 16157 - protein, 674 aa, Homo sapiens
MGPLTFTDVAIEFSLEEWQCLDTAQQNLYRNVMLENYRNLVFLGIAVSKPDLITCLEKEKEPCKMKRHEMVDEPPVVCSHFAEDFWPEQDIKDSFQKVTLRRYDKRGHENLQLRKGYKTVGDCKLYKGGYNGLNQCLTLTQSKMYHCDIYVKVFYAFSNADRYKTRHTGKKPFQCKKCGKSFCMLSQLTQHKKIHIRENTYRCKEFGNAFNQSSALTNHKRIYVGEKHYRCEECGKAFNHYSTLTNHKRIHTGEKPYKCKECGKAFSRYSTLTTHKRIHSGEKPYKCDECGKTFSISSTFTKHKIIHTEEKPYKCKECGKAFNRSSTLTSHKRIHTGEKPYKCEECGKAFNWSSTLTKHKVIHTGEKPYKCEECGKAFNQSSRLTRHKKIHTGEEPYKFEKCGRVFTCSSTLTQDKKIHTGEKPYNCEECGKVFTYSSTLTRHKRIHTEEKPYKCNECGKAFNRSSHLTSHRRIHTGEKPYKCEECGKAFKQSSNLNSHKKIHSGEKPYKCEECGKAFILSSRLTQHKKIHTGEKPYKCEECGKAFNRSSRLTQHKKIHTGEKPYKCKQCDKAFTHSSNLSSHKKIHSGEKPYKCEECGKAFNRSSRLTQHKKIHTREKPYKCEECAKAFTRSSRLTQHKKIHRMGVVAHACNPSTLGGRGGRITRSGDRDRPG

SEQ ID NO: 16158 - protein, 809 aa, Homo sapiens
MGPLTFMDVAIEFCLEEWQCLDIAQQNLYRNVMLENYRNLVFLGIAVSKPDLITCLEQEKEPWEPMRRHEMVAKPPVMCSHFTQDFWPEQHIKDPFQKATLRRYKNCEHKNVHLKKDHKSVDECKVHRGGYNGFNQCLPATQSKIFLFDKCVKAFHKFSNSNRHKISHTEKKLFKCKECGKSFCMLPHLAQHKIIHTRVNFCKCEKCGKAFNCPSIITKHKRINTGEKPYTCEECGKVFNWSSRLTTHKKNYTRYKLYKCEECGKAFNKSSILTTHKIIRTGEKFYKCKECAKAFNQSSNLTEHKKIHPGEKPYKCEECGKAFNWPSTLTKHKRIHTGEKPYTCEECGKAFNQFSNLTTHKRIHTAEKFYKCTECGEAFSRSSNLTKHKKIHTEKKPYKCEECGKAFKWSSKLTEHKLTHTGEKPYKCEECGKAFNWPSTLTKHNRIHTGEKPYKCEVCGKAFNQFSNLTTHKRIHTAEKPYKCEECGKAFSRSSNLTKHKKIHIEKKPYKCEECGKAFKWSSKLTEHKITHTGEKPYKCEECGKAFNHFSILTKHKRIHTGEKPYKCEECGKAFTQSSNLTTHKKIHTGEKFYKCEECGKAFTQSSNLTTHKKIHTGGKPYKCEECGKAFNQFSTLTKHKIIHTEEKPYKCEECGKAFKWSSTLTKHKIIHTGEKPYKCEECGKAFKLSSTLSTHKIIHTGEKPYKCEKCGKAFNRSSNLIEHKKIHTGEQPYKCEECGKAFNYSSHLNTHKRIHTKEQPYKCKECGKAFNQYSNLTTHNKIHTGEKLYKPEDVTVILTTPQTFSNIK

SEQ ID NO: 16159 - protein, 570 aa, Homo sapiens
MENLKSGVYPLKEASGCPGADRNLLVYSFYEKGPLTFRDVAIEFSLEEWQCLDTAQQDLYRKVMLENYRNLVFLAGIAVSKPDLITCLEQGKEPWNMKRHAMVDQPPVTYSHFAQDLWPEQGIKDSFQEVILRRYGKCGHEDLQLRTGCKSVDECNLHKECYDELNQCLTTTQSEIFQYDKYVNVFYKFSNPNIQKIRHTGKKPFKCKKCDKSFCMLLHLTQHKRIHIRENSYQCEECGKVFNWFSTLTRHRRIHTGEKPYKCEQCGKAFKQSSTLTTHKIIHTGEKPYRCEECGKTFNRSSHLTTHKRIHTGEKPYRCEECGRAFNRSSHLTTHKIIHTGEKPYKCEECGKAFNQSSTLTTHKIIHAGEKPYKCEECGKAFYRFSYLTKHKIIHTGEKFYKCEECGKGFNWSSTLTKHKRIHTGEKPYKCEQCGKAFNESSNLTAHKIIHTGEKPYKCEECGKAFNRSPKLTAHKVIHSGEKPYKCEECGKAFNQFSNLTKHKITHIGDTSYKYLECDKAFSQSSTLTKHKVIHTGEKPYNCEEYGKAFNQSSNLIEQSNSYWRETLQM

SEQ ID NO: 16160 - protein, 576 aa, Homo sapiens
MDDLKYGVYPLKEASGCPGAERNLLVYSYFEKETLTFRDVAIEFSLEEWECLNPAQQNLYMNVMLENYKNLVFLGVAVSKQDPVTCLEQEKEPWNMKRHEMVDEPPAMCSYFTKDLWPEQDIKDSFQQVILRRYGKCEHENLQLRKGSASVDEYKVHKEGYNELNQCLTTTQSKIFPCDKYVKVFHKFLNANRHKTRHTGKKPFKCKKCGKSFCMLLHLSQHKRIHIRENSYQCEECGKAFKWFSTLTRHKRIHTGEKPFKCEECGKAFKQSSTLTTHKIIHTGEKPYRCEECGKAFNRSSHLTTHKIIHTGEKPYKCEECGKAFNQSSTLSTHKFIHAGEKPYKCEECDKAFNRFSYLTKHKIIHTGEKSYKCEECGKGFNWSSTLTKHKRIHTGEKPYKCEVCGKAFNESSNLTTHKMIHTGEKPYKCEECGKAFNRSPQLTAHKIIHTGEKPYKCEECGKAFSQSSILTTHKRIHTGEKPYKCEECGKAFNRSSNLTKHKIIHTGEKSYKCEECGKAFNQSSTLTKHRKIHTRQKPYNCEECDNTFNQSSNLIKQNNSYWRETLQMSRMWESL

SEQ ID NO: 16161 - protein, 652 aa, Homo sapiens
MINAQELLTLEDVTVEFTWEEWQLLGPFQKDLYRDVMLEIYSNLLSMGYQVSKPDALSKLERGEEPWTMEDERHSRICPENNEVDDHLQDHLENQRMLKSVEQYHEHNAFGNTASQTKSLCLFRENHDTFELYIKTLKSNLSLVNQNKSCEINNSTKFSGDGKSFLHGNYEELYSAAKFSVSTKANSTKSQVSKHQRTHEIEKNHVCSECGKAFVKKSQLTDHERVHTGEKPYGCTLCAKVFSRKSRLNEHQRIHKREKSFICSECGKVFTMKSRLIEHQRTHTGEKPYICNECGKGFPGKRNLIVHQRNHTGEKSYICSECGKGFTGKSMLIIHQRTHTGEKPYICSECGKGFTTKHYVIIHQRNHTGEKPYICNECGKGFTMKSRMIEHQRTHTGEKPYICSECGKGFPRKSNLIVHQRNHTVEKSYLCSECGKGFTVKSMLIIHQRTHTGEKPYTCSECGKGFPLKSRLIVHQRTHTGEKPYRCSECGKGFIVNSGLMLHQRTHTGEKPYICNECGKGFAFKSNLVVHQRTHTGEKPFMCSECGKGFTMKRYLIVHQQIHTEEKSCICSECGRGFAKETELALHKQVHTGEKPYGCNECGKGFTMKSRLIVHQRTHTGEKPFVCSECRKAFSSKRNLIVHQRTHNGNKP

SEQ ID NO: 16162 - protein, 673 aa, Homo sapiens; identical to SEQ ID NO: 14432

SEQ ID NO: 16163 - protein, 470 aa, Homo sapiens
MAATLLMAGSQAPVTFEDMAMYLTREEWRPLDAAQRDLYRDVMQENYGNVVSLDFEIRSENEVNPKQEISEDVQFGTTSERPAENAEENPESEEGFESGDRSERQWGDLTAEEWVSYPLQPVTDLLVHKEVHTGIRYHICSHCGKAFSQISDLNRHQKTHTGDRPYKCYECGKGFSRSSHLIQHQRTHTGERPYDCNECGKSFGRSSHLIQHQTIHTGEKPHKCNECGKSFCRLSHLIQHQRTHSGEKPYECEECGKSFSRSSHLAQHQRTHTGEKPYECNECGRGFSERSDLIKHYRVHTGERPYKCDECGKNFSQNSDLVRHRRAHTGEKPYHCNECGENFSRISHLVQHQRTHTGEKPYECNACGKSFSRSSHLITHQKIHTGEKPYECNECWRSFGERSDLIKHQRTHTGEKPYECVQCGKGFTQSSNLITHQRVHTGEKPYECTECEKSFSRSSALIKHKRVHTD

SEQ ID NO: 16164 - protein, 828 aa, Homo sapiens
MQNSVSVPPKDEGESNIPSGTIQSRKGLQNKSQFRTIAPKIVPKVLTSRMLPCHSPSRSDQVNLGPSINSKLLGMSTQNYALMQVAGQEGTFSLVALPHVASAQPIQKPRMSLPENLKLPIPRYQPPRNSKASRKKPILIFPKSGCSKAPAQTQMCPQMSPSPPHHPELLYKPSPFEEVPSLEQAPASISTAALTNGSDHGDLRPPVTNTHGSLNPPATPASSTPEEPAKQDLTALSGKAHFVSKITSSKPSAVASEKFKEQVDLAKTMTNLSPTILGNAVQLISSVPKGKLPIPPYSRMKTMEVYKIKSDANIAGFSLPGPKADCDKIPSTTEGFNAATKVASRLPVPQVSQQSACESAFCPPTKLDLNHKTKLNSGAAKRKGRKRKVPDEILAFQGKRRKYIINKCRDGKERVKNDPQEFRDQKLGTLKKYRSIMPKPIMVIPTLASLASPTTLQSQMLGGLGQDVLLNNSLTPKYLGCKQDNSSSPKPSSVFRNGFSGIKKPWHRCHVCNHHFQFKQHLRDHMNTHTNRRPYSCRICRKSYVRPGSLSTHMKLHHGENRLKKLMCCEFCAKVFGHIRVYFGHLKEVHRVVISTEPAPSELQPGDIPKNRDMSVRGMEGSLERENKSNLEEDFLLNQADEVKLQIKCGRCQITAQSFAEIKFHLLDVHGEEIEGRLQEGTFPGSKGTQEELVQHASPDWKRHPERGKPEKVHSSSEESHACPRLKRQLHLHQNGVEMLMENEGPQSGTNKPRETCQGPECPGLHTFLLWSHSGFNCLLCAEMLGRKEDLLHHWKHQHNCEDPSKLWAILNTVSNQGVIELSSEAEK

SEQ ID NO: 16165 - protein, 499 aa, Homo sapiens
MLSLSPILLYTCEMFQDPVAFKDVAVNFTQEEWALLDISQKNLYREVMLETFWNLTSIGKKWKDQNIEYEYQNPRRNFRSVTEEKVNEIKEDSHCGETFTPVPDDRLNFQKKKASPEVKSCDSFVCEVGLGNSSSNMNIRGDTGHKACECQEYGPKPWKSQQPKKAFRYHPSLRTQERDHTGKKPYACKECGKNIIYHSSIQRHMVVHSGDGPYKCKFCGKAFHCLSLYLIHERTHTGEKPYECKQCGKSFSYSATHRIHERTHIGEKPYECQECGKAFHSPRSCHRHERSHMGEKAYQCKECGKAFMCPRYVRRHERTHSRKKLYECKQCGKALSSLTSFQTHIRMHSGERPYECKTCGKGFYSAKSFQRHEKTHSGEKPYKCKQCGKAFTRSGSFRYHERTHTGEKPYECKQCGKAFRSAPNLQLHGRTHTGEKPYQCKECGKAFRSASQLRIHRRIHTGEKPYECKKCGKAFRYVQNFRFHERTQTHKNALWRKTL

SEQ ID NO: 16166 - protein, 663 aa, Homo sapiens
MALCYGTFWGYPKMLEAANLMEGLVDIGPWVTLPRGQPEVLEWGLPKDQDSVAFEDVAVNFTHEEWALLGPSQKNLYRDVMRETIRNLNCIGMKWENQNIDDQHQNLRRNPRCDVVERFGKSKDGSQCGETLSQIRNSIVNKNTPARVDACGSSVNGEVIMGHSSLNCYIRVDTGHKHRECHEYAEKSYTHKQCGKGLSYRHSFQTCERPHTGKKPYDCKECGKTFSSPGNLRRHMVVKGGDGPYKCELCGKAFFWPSLLRMHERTHTGEKPYECKQCSKAFPVYSSYLRHEKIHTGEKPYECKQCSKAFPDYSSYLRHERTHTGEKPYKCKQCGKAFSVSGSLRVHERIHTGEKPYTCKQCGKAFCHLGSFQRHMIMHSGDGPHKCKICGKGFDFPGSARIHEGTHTLEKPYECKQCGKLLSHRSSFRRHMMAHTGDGPHKCTVCGKAFDSPSVFQRHERTHTGEKPYECKQCGKAFRTSSSLRKHETTHTGEQPYKCKCGKAFSDLFSFQSHETTHSEEEPYECKECGKAFSSFKYFCRHERTHSEEKSYECQICGKAFSRFSYLKTHERTHTAEKPYECKQCRKAFFWPSFLLRHERTHTGERPYECKHCGKAFSRSSFCREHERTHTGEKPYECKECGKAFSSLSSFNRHKRTHWKDIL

SEQ ID NO: 16167 - protein, 595 aa, Homo sapiens
MDPVAFKDVAVNFTQEEWALLDISQRKLYREVMLETFRNLTSLGKRWKDQNIEYEHQNPRRNFRSLIEEKVNEIKDDSHCGETFTPVPDDRLNFQEKKASPEVKSCESFVCGEVGLGNSSFNMNIRGDIGHKAYEYQEYGPKPCKCQQPKKAFRYRPSFRTQERDHTGEKPNACKVCGKTFISHSSVRRHMVMHSGDGPYKCKFCGKAFHCLRLYLIHERIHTGEKPCECKQCGKSFSYSATHRIHKRTHTGEKPYEYQECGKAFHSPRSYRRHERIHMGEKAYQCKECGKAFTCPRYVRIHERTHSRKNLYECKQCGKALSSLTSFQTHVRLHSGERPYECKICGKDFCSVNSFQRHEKIHSGEKPYKCKQCGKAFPHSSSLRYHERTHTGEKPYECKQCGKAFRSASHLRVHGRTHTGEKPYECKECGKAFRYVNNLQSHERTQTHIRIHSGERRYKCKICGKGFYCPKSFQRHEKTHTGEKLYECKQRSVVPSVVPVPFDIMKGLTLERSPINASNVGKPSELCQSFECMVGLTLKRNPMSVSNDGKPSDLPHTFEYVVGHTMERSPMHVRNVGNPSDLPRTFEFMKGHKHT

SEQ ID NO: 16168 - protein, 693 aa, Homo sapiens
MDSVAFEDVAINFTCEEWALLGPSQKSLYRDVMQETIRNLDCIGMIWQNHDIEEDQYKDLRRNLRCHMVERACEIKDNSQCGGPFTQTQDSIVNEKIPGVDPWESSECTDVLMGRSSLNCYVRVDSEHKPCEYQEYGEKPYTHTQCGTAFSYQPCFQIHERPQHGKKLYDCKECASFSSLENLQRHMAAHHGDGPRICKLCGNAFIWPSLFHMLRRTHTEEKPYEYEQCSTAFPAYSSTLRHERTHSGEKPYQCKQCGKAFSCSCYTQLYERTHTGEQSYECKQCGKAFYHLGSFQRHMIVHTGDGPHKCKICGKGFLSPSSVRRHKRTHTGEKPYECKYCGKAFSDCTGFRRHMITHTGDGPHKCKVCGKAFDSPSLCRRHETTHTGEKPYKCECGKAFSDFYYFRNHETTHTGEKPYKCKQCGKAFICCTYLQIHERIHTGERPYKCKQCGKAFRSSNYIRVHEKTHTGEKPYECKQCGKALSHLKSFQRHMIMHTGDGPHKCKICGKSFDSPSSFRRHERIHTGERPYKCKLCGKGFRSSSYIQLHERTHTGEKPYGCQQCGKALSDLSSFRRHMITHTGNGPHKCKICGKGFDYPSSVQRHERTHTGEKPYECKECGKAFSHSSYLRIHERVHTGEKPYKCKECGKPFHCPSAFHKHERTHSMEKPYKCKECGEAFHCISSFHKHEMTH

SEQ ID NO: 16169 - protein, 627 aa, Homo sapiens
MIVFGGEDRSDLFLPDSQTNEERKQYDSVAFEDVAVNFTQEEWALLGPSQKSLYRDVMWETIRNLDCIGMKWEDTNIEDQHRNPRRSLRCHIIERFSESRQPDSTVNEKPPGVDPCKSSVCGEIMGCSFLNCYITFDAGHKPDECQEYGEKPHTHKQCGTAFNYHHSFQTQERPHTGKKRYDCKECGKTFSSSGNLRRHIIVQRGGGPYICKLCGKAFFWPSLFRMHERTHTGEKPYECKQCCKAFPIYSSYLRHERTHTGEKPYECKHCSKAFPDYSSYVRHERTHTGEKPYKCKRCGRAFSVSSSLRIHERTHTGEKPYECKQCGKAFHHLGSFQRHMIRHTGDGPHKCKICGKGFDCPSSLQSHERTHTGEKPYECKQCGKALSHHSSFRSHMIMHTGDGPHKCKVCGKAFIYPSVFQGHERTHTGEKPYECKECGKAFRISSSLRRHETTHTGEKPYKCKCGKAFIDFYSFQNHETTHTGEKPYECKECGKAFSCFTYLSQHRRTHMAEKPYECKTCKKAFSHFGNLKVHERIHTGEKPYECKECRKAFSWLTCLLRHERIHTGKKSYECQQCGKAFTRSRFLRGHEKTHTGEKMHECKECGKALSSLSSLHRHKRTHWRDTL

SEQ ID NO: 16170 - protein, 671 aa, Homo sapiens
MASVALEDVAVNFTREEWALLGPCQKNLYKDVMQETIRNLDCVVMKWKDQNIEDQYRYPRKNLRCRMLERFVESKDGTQCGETSSQIQDSIVTKNTLPGVGPCESSMRGEKVMGHSSLNCYIRVGAGHKPHEYHECGEKPDTHKQRGKAFSYHNSFQTHERLHTGKKPYDCKECGKSFSSLGNLQRHMAVQRGDGPYKCKLCGKAFFWPSLLHMHERTHTGEKPYECKQCSKAFSFYSSYLRHERTHTGEKPYECKQCSKAFPFYSSYLRHERTHTGEKPYKCKQCSKAFPDSSSCLIHERTHTGEKPYTCKQCGKAFSVSGSLQRHETTHSAEKPYACQQCGKAFHHLGSFQRHMIRHTGNGPHKCKICGKGFDCPSSLQSHERTHTGEKPYECKQCGKALSHRSSFRSHMIMHTGDGPHKCKVCGKAFVYPSVFQRHERTHTAEKPYKCKQCGKAYRISSSLRRHETTHTGEKPYKCKLGKACIDFCSFQNHKTTHTGEKPYECKECGKAFSRFRYLSRHKRTHTGEKPYECKTCRKAFGHYDNLKVHERIHSGEKPYECKECGKAFSWLTCFLRHERIHMREKSYECPQCGKAFTHSRFLQGHEKTHTGENPYECKECGKAFASLSSLHRHKKTHWKKTHTGENPYECKECGKAFASLSSLHRHKKTH

SEQ ID NO: 16171 - protein, 327 aa, Homo sapiens
MEVAVPVKQEAEGLALDSPWHRFRRFHLGDAPGPREALGLLRALCRDWLRPEVHTKEQMLELLVLEQFLSALPADTQAWVCSRQPQSGEEAVALLEELWGPAASPDGSSATRVPQDVTQGPGATGGKEDSGMIPLAGTAPGAEGPAPGDSQAVRPYKQEPSSPPLAPGLPAFLAAPGTTSCPECGKTSLKPAHLLRHRQSHSGEKPHACPECGKAFRRKEHLRRHRDTHPGSPGSPGPALRPLPAREKPHACCECGKTFYWREHLVRHRKTHSGARPFACWECGKGFGRREHVLRHQRIHGRAAASAQGAVAPGPDGGGPFPPWPLG

SEQ ID NO: 16172 - protein, 1031 aa, Homo sapiens
MPPGRWHAAYPAQAQSSRERGRLQTVKKEEEDESYTPVQAARPQTLNRPGQELFRQLFRQLRYHESSGPLETLSRLRELCRWWLRPDVLSKAQILELLVLEQFLSILPGELRVWVQLHNPESGEEAVALLEELQRDLDGTSWRDPGPAQSPDVHWMGTGALRSAQIWSLASPLRSSSALGDHLEPPYEIEARDFLAGQSDTPAAQMPALFPREGCPGDQVTPTRSLTAQLQETMTFKDVEVTFSQDEWGWLDSAQRNLYRDVMLENYRNMASLVGPFTKPALISWLEAREPWGLNMQAAQPKGNPVAAPTGDDLQSKTNKFILNQEPLEEAETLAVSSGCPATSVSEGIGLRESFQQKSRQKDQCENPIQVRVKKEETNFSHRTGKDSEVSGSNSLDLKHVTYLRVSGRKESLKHGCGKHFRMSSHHYDYKKYGKGLRHMIGGFSLHQRIHSGLKGNKKDVCGKDFSLSSHHQRGQSLHTVGVSFKCSDCGRTFSHSSHLAYHQRLHTQEKAFKCRVCGKAFRWSSNCARHEKIHTGVKPYKCDLCEKAFRRLSAYRLHRETHAKKKFLELNQYRAALTYSSGFDHHLGDQSGEKLFDCSQCRKSFHCKSYVLEHQRIHTQEKPYKCTKCRKTFRWRSNFTRHMRLHEEEKFYKQDECREGFRQSPDCSQPQGAPAVEKTFLCQQCGKTFTRKKTLVDHQRIHTGEKPYQCSDCGKDFAYRSAFIVHKKKHAMKRKPEGGPSFSQDTVFQVPQSSHSKEEPYKCSQCGKAFRNHSFLLIHQRVHTGEKPYKCRECGKAFRWSSNLYRHQRIHSLQKQYDCHESEKTPNVEPKILTGEKRFWCQECGKTFTRKRTLLDHKGIHSGEKRYKCNLCGKSYDRNYRLVNHQRIHSTERPFKCQWCGKEFIGRHTLSSHQRKHTRAAQAERSPPARSSSQDTKLRLQKLKPSEEMPLEDCKEACSQSSRLTGLQDISIGKKCHKCSICGKTFNKSSQLISHKRFHTRERPFKCSKCGKTFRWSSNLARHMKNHIRD

SEQ ID NO: 16173 - protein, 450 aa, Homo sapiens
MPSPLGPPCLPVMDPETTLEEPETARLRFRGFCYQEVAGPREALARLRELCCQWLQPEAHSKEQMLEMLVLEQFLGTLPPEIQAWVRGQRPGSPEEAAALVEGLQHDPGQLLGWITAHVLKQEVLPAAQKTEEPLGSPHPSGTVESPGEGPQDTRIEGSVQLSCSVKEEPNVDGQEVAPSSPPLAAQSPEGNHGHQEPASTSFHPPRIQEEWGLLDRSQKELYWDAMLEKYGTVVSLGLPPHQPEAQAQSELGMLLTGTGVCRSLRSGNESEGPPGCPEAQPPQGPGPAAWEGLSGAATPAPTVRPGTPPVPTQPTPAETRLEPAATPRKPYTCEQCGRGFDWKSVFVIHHRTHTSGPGVQSPGLATGESTEKPPQGEVAFPHHPRRSLTGPRSYPCEECGCSFSWKSQLVIHRKSHTGQRRHFCSDCGRAFDWKSQLVIHRKGHRPEVP

SEQ ID NO: 16174 - protein, 518 aa, Homo sapiens; identical to SEQ ID NO: 14436

SEQ ID NO: 16175 - protein, 682 aa, Homo sapiens
MTKSKEAVTFKDVAVVFSEEELQLLDLAQRKLYRDVMLENFRNVVSVGHQSTPDGLPQLEREEKLWMMKMATQRDNSSGAKNLKEMETLQEVGLRYLPHEELFCSQIWQQITRELIKYQDSVVNIQRTGCQLEKRDDLHYKDEGFSNQSSHLQVHRVHTGEKPYKGEHCVKSFSWSSHLQINQRAHAGEKPYKCEKCDNAFRRFSSLQAHQRVHSRAKSYTNDASYRSFSQRSHLPHHQRVPTGENPYKYEECGRNVGKSSHCQAPLIVHTGEKPYKCEECGVGFSQRSYLQVHLKVHTGKKPYKCEECGKSFSWRSRLQAHERIHTGEKPYKCNACGKSFSYSSHLNIHCRIHTGEKPYKCEECGKGFSVGSHLQAHQISHTGEKPYKCEECGKGFCRASNLLDHQRGHTGEKPYQCDACGKGFSRSSDFNIHFRVHTGEKPYKCEECGKGFSQASNLLAHQRGHTGEKPYKCGTCGKGFSRSSDLNVHCRIHTGEKPYKCERCGKAFSQFSSLQVHQRVHTGEKPYQCAECGKGFSVGSQLQAHQRCHTGEKPYQCEECGKGFCRASNFLAHRGVHTGEKPYRCDVCGKRFRQRSYLQAHQRVHTGERPYKCEECGKVFSWSSYLQAHQRVHTGEKPYKCEECGKGFSWSSSLIIHQRVHADDEGDKDFPSSEDSHRKTR

SEQ ID NO: 16176 - protein, 1061 aa, Homo sapiens
MGDPGSEIIESVPPAGPEASESTTDENEDDIQFVSEGPLRPVLEYIDLVSSDDEEPSTSYTDENIKRKDHIDYQKDKVALTLARLARHVEVEKQQKEEKNRAFREKIDFQHAHGLQELEFIRGHSDTEAARLCVDQWLKMPGLKTGTINCGTKSSFRRGGHTWVSGKPILCPIMHCNKEFDNGHLLLGHLKRFDHSPCDPTITLHGPFFSSFACVVCYKKFVTQQQYRDHLFDKEATDDGHNNNLLPQIIQCFACPNCFLLFSRKEECSKHMSGKNHFHQSFKLGDNKGIAHPISFPSFAKKLLISLCKDVPFQVKCVACHKTLRSHMELTAHFRVHCRNAGPVAVAEKSITQVAEKFILRGYCPDCNQVFVDETSTQNHKQNSGHKVRVINSVEESVLLYCHSSEGNKDPSSDLHLLLDQSKFSSLKRTMSIKESSSLECIAIPKKKMNLKDKSHEGVACVQKEKSVVKTWFCECNQRFPSEDAVEKHVFSANTMGYKCVVCGKVCDDSGVIRLHMSRIHGGAHLNNFLFWCRTCKKELTRKDTIMAHVTEFHNGHRYFYEMDEVEGETLPSSSTTLDNLTANKPSSAITVIDHSPANSSPRGKWQCRICEDMFDSQEYVKQHCMSLASHKFHRYSCAHCRKPFHKIETLYRHCQDEHDNEIKIKYFCGLCDLIFNVEEAFLSHYEEHHSIDYVFVSEKTETSIKTEDDFPVIETSNQLTCGCRESYICKVNRKEDYSRCLQIMLDKGKLWFRCSLCSATAQNLTDMNTHIHQVHKEKSDEEEQQYVIKCGTCTKAFHDPESAQQHFHRKHCFLQKPSVAHFGSEKSNLYKFTASASHTERKLKQAINYSKSLDMEKGVENDLSYQNIEEEIVELPDLDYLRTMTHIVFVDFDNWSNFFGHLPGHLNQGTFIWGFQGGNTNWKPPLNCKIYNYLNRIGCFFLHPRCSKRKDAADFAICMHAGRLDEQLPKQIPFTILSGDQGFLELENQFKKTQRPAHILNPHHLEGDMMCALLNSISDTTKECDSDDNMGAKNTSIGEEFISTEDVELEEAIRRSLEEM

SEQ ID NO: 16177 - protein, 522 aa, Homo sapiens
MAVSHLPTMVQESVTFKDVAILFTQEEWGQLSPAQRALYRDVMLENYSNLVSLGLLGPKPDTFSQLEKREVWMPEDTPGGFCLDWMTMPASKKSTVKAEIPEEELDQWTIKERFSSSSHWKCASLLEWQCGGQEISLQRVVLTHPNTPSQECDESGSTMSSSLHSDQSQGFQPSKNAFECSECGKVFSKSSTLNKHQKIHNEKNANQKIHIKEKRYECRECGKAFHQSTHLIHHQRIHTGEKPYECKECGKAFSVSSSLTYHQKIHTGEKPFECNLCGKAFIRNIHLAHHHRIHTGEKPFKCNICEKAFVCRAHLTKHQNIHSGEKPYKCNECGKAFNQSTSFLQHQRIHTGEKPFECNECGKAFRVNSSLTEHQRIHTGEKPYKCNECGKAFRDNSSFARHRKIHTGEKPYRCGLCEKAFRDQSALAQHQRIHTGEKPYTCNICEKAFSDHSALTQHKRIHTREKPYKCKICEKAFIRSTHLTQHQRIHTGEKPYKCNKCGKAFNQTANLIQHQRHHIGEK

SEQ ID NO: 16178 - protein, 562 aa, Homo sapiens
MAAAWMAPAQESVTFEDVAVTFTQEEWGQLDVTQRALYVEVMLETCGLLVALGDSTKPETVEPIPSHLALPEEVSLQEQLAQGVPRYSYLGQAMDQDGPSEMQEYFLRPGTDPQSEKLHGKMSLEHEGLATADGICSMMIQNQVSPEDALYGFDSYGPVTDSLIHEGENSYKFEEMFNENCFLVQHEQILPRVKPYDCPECGKAFGKSKHLLQHHIIHTGEKPYKCLECGKDFNRRSHLTRHQRTHNGDKPFVCSECGRTFNRGSHLTRHQRVHSGEKPFVCNECGKAFTYRSNFVLHNKSHNEKKPFACSECGKGFYESTALIQHFIIHTGERPFKCLECGKAFNCRSHLKQHERIHTGEKPFVCSQCGKAFTHYSTYVLHERAHTGEKPFECKECGKAFSIRKDLIRHFNIHTGEKPYECLQCGKAFTRMSGLTRHQWIHTGEKPYVCIQCGKAFCRTTNLIRHFSIHTGEKPYECVECGKAFNRRSPLTRHQRIHTAEKSHEPIQSGNVSCESTDLIQHSIIHTESSPVSAVNMETPSIAAHSSSLDINGFIVEETLPL

SEQ ID NO: 16179 - protein, 563 aa, Homo sapiens
MAHELVMFRDVAIDVSQEEWECLNPAQRNLYKEVMLENYSNLVSLGLSVSKPAVISSLEQGKEPWMVVREETGRWCPGTWKTWGFHNNFLDNNEATDINADLASRDEPQKLSPKRDIYETELSQWVNMEEFKSHSPERSIFSAIWEGNCHFEQHQGQEEGYFRQLMINHENMPIFSQHTLLTQEFYDREKISECKKCRKIFSYHLFFSHHKRTHSKELSECKECTEIVNTPCLFKQQTIQNGDKCNECKECWKAFVHCSQLKHLRIHNGEKRYECNECGKAFNYGSELTLHQRIHTGEKPYECKECGKAFRQRSQLTQHQRLHTGEKPYECKQCGKAFIRGFQLTEHLRLHTGEKPYECKECGKTFRHRSHLTIHQRIHTGEKPYECRECGKAFSYHSSFSHHQKIHSGKKPYECHECGKAFCDGLQLTLHQRIHTGEKPYECKECGKTFRQCSHLKRHQRIHTGEKPHECMICGKAFRLHSHLIQHQRIHTGEKPYECKECGKAFSYHSSFSHHQRIHSGKKPYQCGKAFNHRLQLNLHQTLHTGEKPVRFPLLPPHPSLAS

SEQ ID NO: 16180 - protein, 2506 aa, Homo sapiens
MEVLQCDGCDFRAPSYEDLKAHIQDVHTAFLQPTDVAEDNVNELRCGSVNASNQTEVEFSSIKDEFAIAEDLSGQNATSLGTGGYYGHSPGYYGQHIAANPKPTNKFFQCKFCVRYFRSKNLLIEHTRKVHGAQAEGSSSGPPVPGSLNYNIMMHEGFGKVFSCQFCTYKSPRRARIIKHQKMYHKNNLKETTAPPPAPAPMPDPVVPPVSLQDPCKELPAEVVERSILESMVKPLTKSRGNFCCEWCSYQTPRRERWCDHMMKKHRSMVKILSSLRQQQEGTNLPDVPNKSAPSPTSNSTYLTMNAASREIPNTTVSNFRGSMGNSIMRPNSSASKFSPMSYPQMKPKSPHNSGLVNLTERSRYGMTDMTNSSADLETNSMLNDSSSDEELNEIDSENGLSAMDHQTSGLSAEQLMGSDGNKLLETKGIPFRRFMNRFQCPFCPFLTMHRRSISRHIENIHLSGKTAVYKCDECPFTCKSSLKLGAHKQCHTGTTSDWDAVNSQSESISSSLNEGVVSYESSSINGRKSGVMLDPLQQQQPPQPPPPPPPPPPSQPQPLQQPQPPQLQPPHQVPPQPQTQPPPTQQPQPPTQAAPLHPYKCTMCNYSTTTLKGLRVHQQHKHSFCDNLPKFEGQPSSLPLENETDSHPSSSNTVKKSQTSILGLSSKNNFVAKASRKLANDFPLDLSPVKKRTRIDEIASNLQSKINQTKQQEDAVINVEDDEEEEEDNEVEIEVELDREEEPTEPIIEVPTSFSAQQIWVRDTSEPQKEPNFRNITHDYNATNGAEIELTLSEDEEDYYGSSTNLKDHQVSNTALLNTQTPIYGTEHNSENTDFGDSGRLYYCKHCDFNNKSARSVSTHYQRMHPYIKFSFRYILDPNDHSAVYRCLECYIDYTNFEDLQQHYGEHHPEAMNVLNFDHSDLIYRCRFCSYTSPNVRSLMPHYQRMHPTVKINNAMIFSSYVVEQQEGLNTESQTLREILNSAPKNMATSTPVARGGGLPATFNKNTPKTFTPECENQKDPLVNTVVVYDCDVCSFASPNMHSVLVHYQKKHPEEKASYFRIQKTMRMVSVDRGSALSQLSFEVGAPMSPKMSNMGSPPPPQPPPPDLSTELYYCKHCSYSNRSVVGVLVHYQKRHPEIKVTAKYIRQAPPTAAMMRGVEGPQGSPRPPAPIQQLNRSSSERDGPPVENEMFFCQHCDYGNRTVKGVLIHYQKKHRDFKANADVIRQHTATIRSLCDRNQKKPASCVLVSPSNLERDKTKLRALKCRQCSYTSPYFYALRKHIKKDHPALKATVTSIMRWAFLDGLIEAGYHCEWCIYSHTEPNGLLLHYQRRHPEHYVDYTYMATKLWAGPDPSPPSLTMPAEAKTYRCRDCVFEAVSIWDITNHYQAFHPWAMNGDESVLLDIIKEKDAVEKPILSSEELAGPVNCENSIPTPFPEQEAECPEDARLSPEKSLQLASANPAISSTPYQCTVCQSEYNNLHGLLTHYGKKHPGMKVKAADFAQDIDINPGAVYKCRHCPYINTRIHGVLTHYQKRHPSIKVTAEDFVHDVEQSADISQNDVEETSRIFKQGYGAYRCKLCPYTHGTLEKLKIHYEKYHNQPEFDVFSQSPPKLPVPLEPEMTTEVSPSQVSITEEEVGEEPVSTSHFSTSHLVSHTVFRCQLCKYFCSTRKGIARHYRIKHNNVRAQPEGKNNLFKCALCAYTNPIRKGLAAHYQKRHDIDAYYTHCLAASRTISDKPNKVIIPSPPKDDSPQLSEELRRAVEKKKCSLCSFQSFSKKGIVSHYMKRHPGVFPKKQHASKLGGYFTAVYADEHEKPTLMEEEERGNFEKAEVEGEAQEIEWLPFRCIKCFKLSFSTAELLCMHYTDHHSRDLKRDFIILGNGPRLQNSTYQCKHCDSKLQSTAELTSHLNIHNEEFQKRAKRQERRKQLLSKQKYADGAFADFKQERPFGHLEEVPKIKERKVVGYKCKFCVEVHPTLRAICNHLRKHVQYGNVPAVSAAVKGLRSHERSHLALAMFTREDKYSCQYCSFVSAFRHNLDRHMQTHHGHHKPFRCKLCSFKSSYNSRLKTHILKAHAGEHAYKCSWCSFSTMTISQLKEHSLKVHGKALTLPRPRIVSLLSSHSHHSSQKATPAEEVEDSNDSSYSEPPDVQQQLNHYQSAALARNNSRVSPVPLSGAAAGTEQKTEAVLHCEFCEFSSGYIQSIRRHYRDKHGGKKLFKCKDCSFYTGFKSAFTMHVEAGHSAVPEEGPKDLRCPLCLYHTKYKRNMIDHIVLHREERVVPIEVCRSKLSKYLQGVVFRCDKCTFTCSSDESLQQHIEKHNELKPYKCQLCYYETKHTEELDSHLRDEHKVSRNFELVGRVNLDQLEQMKEKMESSSSDDEDKEEEMNSKAEDRELMRFSDHGAALNTEKRFPCEFCGRAFSQGSEWERHVLRHGMALNDTKQVSREEIHPKEIMENSVKMPSIEEKEDDEAIGIDFSLKNETVAICVVTADKSLLENAEAKKE

SEQ ID NO: 16181 - protein, 595 aa, Homo sapiens
MRETLEALSSLGFSVGQPEMAPQSEPREGSHNAQEQMSSSREERALGVCSGHEAPTPEEGAHTEQAEAPCRGQACSAQKAQPVGTCPGEEWMIRKVKVEDEDQEAEEEVEWPQHLSLLPSPFPAPDLGHLAAAYKLEPGAPGALSGLALSGWGPMPEKPYGCGECERRFRDQLTLRLHQRLHRGEGPCACPDCGRSFTQRAHMLLHQRSHRGERPFPCSECDKRFSKKAHLTRHLRTHTGERPYPCAECGKRFSQKIHLGSHQKTHTGERPFPCTECEKRFRKKTHLIRHQRIHTGERPYQCAQCARSFTHKQHLVRHQRVHQTAGPARPSPDSSASPHSTAPSPTPSFPGPKPFACSDCGLSFGWKKNLATHQCLHRSEGRPFGCDECALGATVDAPAAKPLASAPGGPGCGPGSDPVVPQRAPSGERSFFCPDCGRGFSHGQHLARHPRVHTGERPFACTQCDRRFGSRPNLVAHSRAHSGARPFACAQCGRRFSRKSHLGRHQAVHTGSRPHACAVCARSFSSKTNLVRHQAIHTGSRPFSCPQCGKSFSRKTHLVRHQLIHGEAAHAAPDAALAAPAWSAPPEVAPPPLFF

SEQ ID NO: 16182 - protein, 522 aa, Homo sapiens
MALPQGLLTFRDVAIEFSQEEWKCLDPAQRTLYRDVMLENYRNLVSLDISSKCMLKTLSSTGQGNTEVIHTGTLHRQASHHIGEFCFHEIEKDIHGFEFQWKEDETNGHAAPMTEIKELAGSTGQHDQRHAGNKRIKDQLGSSFHLHLPEPHIFQSEGKIGNQVEKSINNASSVSTSQRICCRPKTHISNKYGNNSLHSSLLTQKWEVHMREKSFECIQSFKSFNCSSLLKKHQIIHLEEKQCKCDVCGKVFNQKRYLACHRRCHTGEKPYKCNECGKTFGHNSSLFIHKALHTGEKPYECEECDKVFSRKSHLERHKRIHTGEKPYKCKVCDEAFAYNSYLAKHTILHTGEKPYTCNECGKVFNRLSTLARHHRLHTGEKPYKCEECDKVFSRKSHLERHRRIHSGEKPYKCEECCKVFSRKSNLERHRRIHTGEKPYKCKVCDKAFQRDSHLAQHQRVHTGEKPYKCNECGKTFGQTSSLIIHRRLHTGEKPYKCNECGKTFSQMSSLVYHHRLHSGEKP

SEQ ID NO: 16183 - protein, 3925 aa, Homo sapiens
MPGERPRGAPPPTMTGDLQPRQVASSPGHPSQPPLEDNTPATRTTKGAREAGGQAQAMELPEAQPRQARDGELKPPSLRGQAPSSTPGKRGSPQTPPGRSPLQAPSRLAGRAEGSPPQRYILGIASSRTKPTLDETPENPQLEAAQLPEVDTPQGPGTGAPLRPGLPRTEAQPAAEELGFHRCFQEPPSSFTSTNYTSPSATPRPPAPGPPQSRGTSPLQPGSYPEYQASGADSWPPAAENSFPGANFGVPPAEPEPIPKGSRPGGSPRGVSFQFPFPALHGASTKPFPADVAGHAFTNGPLVFAFHQPQGAWPEEAVGTGPAYPLPTQPAPSPLPCYQGQPGGLNRHSDLSGALSSPGAAHSAPRPFSDSLHKSLTKILPERPPSAQDGLGSTRGPPSSLPQRHFPGQAYRASGVDTSPGPPDTELAAPGPPPARLPQLWDPTAAPYPTPPGGPLAATRSMFFNGQPSPGQRLCLPQSAPLPWPQVLPTARPSPHGMEMLSRLPFPAGGPEWQGGSQGALGTAGKTPGPREKLPAVRSSQGGSPALFTYNGMTDPGAQPLFFGVAQPQVSPHGTPSLPPPRVVGASPSESPLPSPATNTAGSTCSSLSPMSSSPANPSSEESQLPGPLGPSAFFHPPTHPQETGSPFPSPEPPHSLPTHYQPEPAKAFPFPADGLGAEGAFQCLEETPFPHEGPEVGRGGLQGFPRAPPPYPTHHFSLSSASLDQLDVLLTCRQCDRNYSSLAAFLAHRQFCGLLLARAKDGHQRSPGPPGLPSPPAAPRVPADAHAGLLSHAKTFLLAGDAQAEGKDDPLRTGFLPSLAATPFPLPASDLDMEDDAKLDSLITEALNGMEYQSDNPEIDSSFIDVFADEEPSGPRGPSSGHPLKSKAGVTPESKAPPPLPAATPDPQTPRPGDRGCPARGRPKTRSLGLAPTEADAPSQGRQQRRGKQLKLFRKDLDSGGAAEGSGSGGGGRASGLRPRRNDGLGERPPPRPRRPRTQAPGSRADPAPRVPRAAALPEETRSSRRRRLPPRKDPRKRKARGGAWGKELILKIVQQKNRLREYDFASESEEDEQPPPRGPGFRGRRGRGEKRKEVELTQGPREDEPQKPRKAARQEAGGDGAPANPEEPGGSRPGPGRSPQARGPSRSLETGAAAREGGPKCADRPSVAPKDPLQVPTNTETSEETRPSLDFPQEAKEPETAEESAPDSTEFTEALRSPPAACAGEMGASPGLLIPEQPPPSRHDTGTPKPSGSLANTAPHGSSPTPGVGSLLGGPGGTQAPVSHNSKDPPARQPGEFLAPVANPSSTACPKPSVLSSKISSFGCDPAGFNRDPLGVPVAKKGPQPYSSPHSELFLGPKDLAGCFLEELHPKPSARDAPPASSSCLCQDGEDAGSLEPQLPRSPPGTAETEPGRAASPPTLESSSLFPDLPVDRFDPPLYGSLSANRDSGLPFACADPPQKTVPSDPPYPSFLLLEEVSPMLPSHFPDLSGGKVLSKTCPPERTVVPGAAPSLPGKGSGCSVALMSHLSEDELEIQKLVTELESQLQRSKDTRGAPRELAEAESVGRVELGTGTEPPSQRRTCQATVPHEDTFSAADLTRVGESTAHREGAESAVATVEAVQGRPGGTWPCPASFHPGHAALLPCAQEDLVSGAPFSPRGANFHFQPVQKAGASKTGLCQAEGDSRPPQDVCLPEPSKQPGPQLDAGSLAKCSPDQELSFPKNKEAASSQESEDSLRLLPCEQRGGFLPEPGTADQPHRGAPAPEAFGSPAVHLAPDLAFQGDGAPPLDATWPFGASPSHAAQGHSAGRAGGHLHPTAGRPGFEGNEFAPAGASSLTAPRGREAWLVPVPSPACVSNTHPSRRSQDPALSPPIRQLQLPGPGVAKSKDGILGLQELTPAAQSPPRVNPSGLEGGTVEGGKVACGPAQGSPGGVQVTTLPAVAGHQLGLEADGHWGLLGQAEKTQGQGTANQLQPENGVSPGGTDNHASVNASPKTALTGPTEGAVLLEKCKGSRAAMSLQEEAEPTPSPPSPNRESLALALTAAHSRSGSEGRTPERASSPGLNKPLLATGDSPAPSVGDLAACAPSPTSAAHMPCSLGPLPREDPLTSPSRAQGGLGGQLPASPSCRDPPGPQQLLACSPAWAPLEEADGVQATTDTGAEDSPVAPPSLTTSPCDPKEALAGCLLQGEGSPLEDPSSWPPGSVSAVTCTHSGDTPKDSTLRIPEDSRKEKLWESPGRATSPPLAGAVSPSVAVRATGLSSTPTGDEAQAGRGLPGPDPQSRGAPPHTNPDRMPRGHSSYSPSNTARLGHREGQAVTAVPTEPPTLQGAGPDSPACLEGEMGTSSKEPEDPGTPETGRSGATKMPRVTCPSTGLGLGRTTAPSSTASDFQSDSPQSHRNASHQTPQGDPLGPQDLKQRSRGYKKKPASTENGQWKGQAPHGPVTCEVCAASFRSGPGLSRHKARKHRPHPGAPAEPSPAALPAQQPLEPLAQKCQPPRKKSHRVSGKERPNHSRGDPSHVTQPPPAQGSKEVLRAPGSPHSQQLHPPSPTEHEVDVKTPASKPRPDQAREDELHPKQAEKREGRRWRREPTVDSPSHSEGKSNKKRGKLRGRRLREESILPVSADVISDGRGSRPSPAMASYAASPSHCLSVEGGPEADGEQPPRLATLGPGVMEGAAETDQEALCAGETGAQKPPGDRMLCPGRMDGAALGEQPTGQKGASARGFWGPRETKALGVCKESGSEPAEDSSRAHSRSEEGVWEENTPPLGPLGFPETSSSPADSTTSSCLQGLPDNPDTQGGVQGPEGPTPDASGSSAKDPPSLFDDEVSFSQLFPPGGRLTRKRNPHVYGKRCEKPVLPLPTQPSFEEGGDPTLGPARLPTDLSDSSSLCLCHEDPWEDEDPAGLPESFLLDGFLNSRVPGIDPWAPGLSLWALEPSREAGAEKLPSHCPEDDRPEAIPELHMVPAAWRGLEMPAPADDSSSSLGDVSPEPPSLERERCDGGLPGNTHLLPLRATDFEVLSTKFEMQDLCFLGPFEDPVGLPGPSFLDFEGTASSQGPQSRRTEEAAGAGRAQGRGRPAKGRRASYKCKVCFQRFRSLGELDLHKLAHTPAPPPTCYMCVERRFGSRELLRGHLQERHAQSKAGPWACGMCLKEVADVWMYNEHLREHAVRFARRGQARRSLGDLPGGLEGSSAVAHLLNSITEPAPKHHRGKRSAGKAAGSPGDPWGQEGEAKKDSPGERAKPRARSTPSNPDGAATPDSASATALADAGSPGPPRTTPSPSPDPWAGGEPLLQATPVHEACKDPSRDCHHCGKRFPKPFKLQRHLAVHSPQRVYLCPRCPRVYPEHGELLAHLGGAHGLLERPELQHTPLYACELCATVMRIIKKSFACSSCNYTFAKKEQFDRHMNKHLRGGRQPFAFRGVRRPGAPGQKARALEGTLPSKRRRVAMPGSAPGPGEDRPPPRGSSPILSEGSLPALLHLCSEVAPSTTKGWPETLERPVDPVTHPIRGCELPSNHQECPPPSLSPFPAALADGRGDCALDGALERPENEASPGSPGPLLQQALPLGASLPRPGARGQDAEGKRAPLVFSGKRRAPGARGRCAPDHFQEDHLLQKEKEVSSSHMVSEGGPRGTFHKGSATKPAGCQSSSKDRSAASTPSKALKFPVHPRKAVGSLAPGELARGTENGMKPATPKAKPGPSSQGSGSPRPGTKTGGGSQPQPASGQLQSETATTPAKPSFPSRSPAPERLPARAQAKSCTKGPREAGEQGPHGSLGPKEKGESSTKRKKGQVPGPARSESVGSFGRAPSAPDKPPRTPRKQATPSRVLPTKPKPNSQNKPRPPPSEQRKAEPGHTQRKDRLGKAFPQGRPLLRPPKRGTAVHGAEPAEPHTHRTAEAQSDLLSQLFGQRLTGFKIPLKKDASE

SEQ ID NO: 16184 - protein, 717 aa, Homo sapiens
MKSQEEVEVAGIKLCKAMSLGSVTFTDVAIDFSQDEWEWLNLAQRSLYKKVMLENYRNLVSVGLCISKPDVISLLEQEKDPWVIKGGMNRGLCPDLECVWVTKSLSLNQDIYEEKLPPAIIMERLKSYDLECSTLGKNWKCEDLFERELVNQKTHFRQETITHIDTLIEKRDHSNKSGTVFHLNTLSYIKQIFPMEERIFNFHTDKKSLKTHSVVKKHKQDRGEKKLLKCNDCEKIFSKISTLTLHQRIHTGEKPYECIECGKAFSQSAHLAQHQRIHTGEKPFECTECGKAFSQNAHLVQHQRVHTGEKPYQCKQCNKAFSQLAHLAQHQRVHTGEKPYECIECGKAFSDCSSLAHHRRIHTGKRPYECIDCGKAFRQNASLIRHRRYYHTGEKPFDCIDCGKAFTDHIGLIQHKRTHTGERPYKCNVCGKAFSHGSSLTVHQRIHTGEKPYECNICEKAFSHRGSLTLHQRVHTGEKPYECKECGKAFRQSTHLAHHQRIHTGEKPYECKECSKTFSQNAHLAQHQKIHTGEKPYECKECGKAFSQIAHLVQHQRVHTGEKPYECIECGKAFSDGSYLVQHQRLHSGKRPYECLECGKAFRQRASLICHQRCHTGEKPYECNVCGKAFSHRKSLTLHQRIHTGEKPYECKECSKAFSQVAHLTLHKRIHTGERPYECKECGKAFRQSVHLAHHQRIHTGESSVILSSALPYHQVL

SEQ ID NO: 16185 - protein, 626 aa, Homo sapiens
MNVEVVKVMPQDLVTFKDVAIDFSQEEWQWMNPAQKRLYRSMMLENYQSLVSLGLCISKPYVISLLEQGREPWEMTSEMTRSPFSDWESIYVTQELPLKQFMYDDACMEGITSYGLECSTFEENWKWEDLFEKQMGSHEMFSKKEIITHKETITKETEFKYTKFGKCIHLENIEESIYNHTSDKKSFSKNSMVIKHKKVYVGKKLFKCNECDKTFTHSSSLTVHFRIHTGEKPYACEECGKAFKQRQHLAQHHRTHTGEKLFECKECRKAFKQSEHLIQHQRIHTGEKPYKCKECRKAFRQPAHLAQHQRIHTGEKPYECKECGKAFSDGSSFARHQRCHTGKRPYECIECGKAFRYNTSFIRHWRSYHTGEKPFNCIDCGKAFSVHIGLILHRRIHTGEKPYKCGVCGKTFSSGSSRTVHQRIHTGEKPYECDICGKDFSHHASLTQHQRVHSGEKPYECKECGKAFRQNVHLVSHLRIHTGEKPYECKECGKAFRISSQLATHQRIHTGEKPYECIECGNAFKQRSHLAQHQKTHTGEKPYECNECGKAFSQTSNLTQHQRIHTGEKPYKCTECGKAFSDSSSCAQHQRLHTGQRPYQCFECGKAFRRKLSLICHQRSHTGEEP

SEQ ID NO: 16186 - protein, 871 aa, Homo sapiens
MAEEFVTLKDVGMDFTLGDWEQLGLEQGDTFWDTALDNCQDLFLLDPPRPNLTSHPDGSEDLEPLAGGSPEATSPDVTETKNSPLMEDFFEEGFSQEIIEMLSKDGFWNSNFGEACIEDTWLDSLLGDPESLLRSDIATNGESPTECKSHELKRGLSPVSTVSTGEDSMVHNVSEKTLTPAKSKEYRGEFFSYSDHSQQDSVQEGEKPYQCSECGKSFSGSYRLTQHWITHTREKPTVHQECEQGFDRNASLSVYPKTHTGYKFYVCNEYGTTFSQSTYLWHQKTHTGEKPCKSQDSDHPPSHDTQPGEHQKTHTDSKSYNCNECGKAFTRIFHLTRHQKIHTRKRYECSKCQATFNLRKHLIQHQKTHAAKTTSECQECGKIFRHSSLLIEHQALHAGEEPYKCNERGKSFRHNSTLKIHQRVHSGEKPYKCSECGKAFHRHTHLNEHRRIHTGYRPHKCQECVRSFSRPSHLMRHQAIHTAEKPYSCAECKETFSDNNRLVQHQKMHTVKTPYECQECGERFICGSTLKCHESVHAREKQGFFVSGKILDQNPEQKEKCFKCNKCEKTFSCSKYLTQHERIHTRGVKPFECDQCGKAFGQSTRLIHHQRIHSRVRLYKWGEQGKAISSASLIKLQSFHTKEHPFKCNECGKTFSHSAHLSKHQLIHAGENPFKCSKCDRVFTQRNYLVQHERTHARKKPLVCNECGKTFRQSSCLSKHQRIHSGEKPYVCDYCGKAFGLSAELVRHQRIHTGEKPYVCQECGKAFTQSSCLSIHRRVHTGEKPYRCGECGKAFAQKANLTQHQRIHTGEKPYSCNVCGKAFVLSAHLNQHLRVHTQETLYQCQRCQKAFRCHSSLSRHQRVHNKQQYCL

SEQ ID NO: 16187 - protein, 364 aa, Homo sapiens
MERGKKKRISNKLQQTFHHSKEPTFLINQAGLLSSDSYSSLSPETESVNPGENIKTDTQKKRPGTVILSKLSSRRIISESQLSPPVIPARRPGFRVCYICGREFGSQSIAIHEPQCLQKWHIENSKLPKHLRRPEPSKPQSLSSSGSYSLQATNEAAFQSAQAQLLPCESCGRTFLPDHLLVHHRSCKPKGEGPRAPHSNSSDHLTGLKKACSGTPARPRTVICYICGKEFGTLSLPIHEPKCLEKWKMENDRLPVELHQPLPQKPQPLPNAQSSQAGPNQAQLVFCPHCSRIFTSDRLLVHQRSCKTHPYGPKYQNLNLGSKGGLKEYTNSKQQRNRAAPSVTDKVIHATQDALGEPGGALCL

SEQ ID NO: 16188 - protein, 1883 aa, Homo sapiens; identical to SEQ ID NO: 15972

SEQ ID NO: 16189 - protein, 524 aa, Homo sapiens
MAKRPGPPGSREMGLLTFRDIAIEFSLEEWQCLDCAQRNLYRDVMLENYRNLVSLGIAVSKPDLITCLEQNKESQNIKRNEMVAKHPVTRSHFTQDLQPEQGIKDSLQKVIPRTYGKCGHEKLQFKKCCKSVGEYEVHKGGYSEVNQCLSTTQNKIFQTHKYVKVFGKFSNSNRDKTRYTGNKHFKCNKYGKSFCMLSHLNQHQVIHTREKSYKCKECGKSFNCSSNHTTHKIIHTGEKPYRCEECGKAFSWSANLTRHKRTHTGEKPYTCEECGQAFRRSSALTNHKRIHTGERPYKCEECGKAFSVSSTLTDHKRIHTGEKPCRCEECGKAFSWSSNLTRHKRIHTREKPYACEECGQAFSLSSNLMRHRRIHTGEKPYTCEECGQDFRRSSALTIHKRIHTGERPYKCEECGKVFSLSSTLTDHKRIHTGERPYKCEECGKAFSLSSTLTDHKRIHTGERPYTCEECGKAFNCSSTLMQHKRIHTGEKPYKCEECEQAFKWHSSLAKHKIIHTGEKPYKCE

SEQ ID NO: 16190 - protein, 618 aa, Homo sapiens
MERAVEPWGPDLHRPEEREPQRGARTGLGSENVISQPNEFEHTPQEDDLGFKEEDLAPDHEVGNASLKPEGIQNWDDLWVQREGLGKPQPRDRGPRLLGEPRWGQASSDRAAVCGECGKSFRQMSDLVKHQRTHTGEKPYKCGVCGKGFGDSSARIKHQRTHSGEKPYRARPPAQGPPKIPRSRIPAGERPTICGECGKSFRQSSDLVKHQRTHTGEKPYKCGICGKGFGDSSARIKHQRTHRGEQPPRPVVPRRQPSRAATAATQGPKAQDKPYICTDCGKRFVLSCSLLSHQRSHLGPKPFGCDVCGKEFARGSDLVKHLRVHTGEKPYLCPECGKGFADSSARVKHLRTHSGERPHACPECDRTFSLSSTLLRHRLTHMEPQDFSFPGYPLPALIPSPPPPPLGTSPPLTPRSPSHSGEPFGLPGLEPEPGGPQAGEPPPPLAGDKPHKCPECGKGFRRSSDLVKHHRVHTGEKPYLCPECGKGFADSSARVKHLRTHRGERARPPPPSTLLRPHNPPGPVPMAPRPRVRAQPSGPSQPHVCGFCGKEFPRSSDLVKHRRTHTGEKPYKCAECGKGFGDSSARIKHQRGHLVLTPFGIGDGRARPLKQEAATGLE

SEQ ID NO: 16191 - protein, 535 aa, Homo sapiens
MLCDEKAQKRRKRKAKESGMALPQGHLTFRDVAIEFSQAEWKCLDPAQRALYKDVMLENYRNLVSLGISLPDLNINSMLEQRREPWSGESEVKIAKNSDGRECIKGVNTGSSYALGSNAEDKPIKKQLGVSFHLHLSELELFPDERVINGCNQVENFINHSSSVSCLQEMSSSVKTPIFNRNDFDDSSFLPQEQKVHLREKPYECNEHSKVFRVSSSLTKHQVIHTVEKPYKCNSCGKVFSRNSHLAEHCRIHTGEKPYKCNVCGKVFSYNSNFARHQRIHTREKPYECNECGKVFSNNSYLARHQRIHAEEKPYKCNECGKGFSHKSSLANHWRIYTGEKPYKCDECGKAFYRIALLVRHQKIHTGEKPYKCNECGKVFIQNSHLAQHWRIHTGEKPYKCNECGKVFNQLSNLARHRRIHTGEKPYKCNECGKAFSEYSGLSAHLVIHTGEKPYKCSECGKAFRHKLSLTNHQRIHTGERPYKCNECGKVFNRIAHLARHRKIHTGEKPYKCNECGKAFSRISYLAQHWTIHMG

SEQ ID NO: 16192 - protein, 744 aa, Homo sapiens
MQAVVPLNKMTAISPEPQTLASTEQNEVPRVVTSGEQEAILRGNAADAESFRQRFRWFCYSEVAGPRKALSQLWELCNQWLRPDIHTKEQILELLVFEQFLTILPGEIRIWVKSQHPESSEEVVTLIEDLTQMLEEKDPVSQDSTVSQEENSKEDKMVTVCPNTESCESITLKDVAVNFSRGEWKKLEPFQKELYKEVLLENLRNLEFLDFPVSKLELISQLKWVELPWLLEEVSKSSRLDESALDKIIERCLRDDDHGLMEESQQYCGSSEEDHGNQGNSKGRVAQNKTLGSGSRGKKFDPDKSPFGHNFKETSDLIKHLRVYLRKKSRRYNESKKPFSFHSDLVLNRKEKTAGEKSRKSNDGGKVLSHSSALTEHQKRQKIHLGDRSQKCSKCGIIFIRRSTLSRRKTPMCEKCRKDSCQEAALNKDEGNESGEKTHKCSKCGKAFGYSASLTKHRRIHTGEKPYMCNECGKAFSDSSSLTPHHRTHSGEKPFKCDDCGKGFTLSAHLIKHQRIHTGEKPYKCKDCGRPFSDSSSLIQHQRIHTGEKPYTCSNCGKSFSHSSSLSKHQRIHTGEKPYKCGECGKAFRQNSCLTRHQRIHTGEKPYLCNDCGMTFSHFTSVIYHQRLHSGEKPYKCNQCEKAFPTHSLLSRHQRIHTGVKPYKCKECGKSFSQSSSLNEHHRIHTGEKPYECNYCGATFSRSSILVEHLKIHTGRREYECNECEKTFKSNSGLIRHRGFHSAE

SEQ ID NO: 16193 - protein, 852 aa, Homo sapiens
MTKSLESVSFKDVTVDFSRDEWQQLDLAQKSLYREVMLENYFNLISVGCQVPKPEVIFSLEQEEPCMLDGEIPSQSRPDGDIGFGPLQQRMSEEVSFQSEININLFTRDDPYSILEELWKDDEHTRKCGENQNKPLSRVVFINKKTLANDSIFEYKDIGEIVHVNTHLVSSRKRPHNCNSCGKNLEPIITLYNRNNATENSDKTIGDGDIFTHLNSHTEVTACECNQCGKPLHHKQALIQQQKIHTRESLYLFSDYVNVFSPKSHAFAHESICAEEKQHECHECEAVFTQKSQLDGSQRVYAGICTEYEKDFSLKSNRQKTPYEGNYYKCSDYGRAFIQKSDLFRCQRIHSGEKPYEYSECEKNLPQNSNLNIHKKIHTGGKHFECTECGKAFTRKSTLSMHQKIHTGEKPYVCTECGKAFIRKSHFITHERIHTGEKPYECSDCGKSFIKKSQLHVHQRIHTGENPFICSECGKVFTHKTNLIIHQKIHTGERPYICTVCGKAFTDRSNLIKHQKIHTGEKPYKCSDCGKSFTWKSRLRIHQKCHTGERHYECSECGKAFIQKSTLSMHQRIHRGEKPYVCTECGKAFFHKSHFITHERIHTGEKPYECSICGKSFTKKSQLHVHQQIHTGEKPYRCAECGKAFTDRSNLFTHQKIHTGEKPYKCSDCGKAFTRKSGLHIHQQSHTGERHYECSECGKAFARKSTLIMHQRIHTGEKPYICNECGKSFIQKSHLNRHRRIHTGEKPYECSDCGKSFIKKSQLHEHHRIHTGEKPYICAECGKAFTIRSNLIKHQKIHTKQKPYKCSDLGKALNWKPQLSMPQKSDNGEVECSMPQLWCGDSEGDQGQLSSI

SEQ ID NO: 16194 - protein, 441 aa, Homo sapiens
MAPRAQIQGPLTFGDVAVAFTRIEWRHLDAAQRALYRDVMLENYGNLVSVGLLSSKPKLITQLEQGAEPWTEVREAPSGTHAVEDYWFETKMSALKQSTSEASVLGERTKSVMMEKGLDWEGRSSTEKNYKCKECGKVFKYNSSFISHQRNHTSEKPHKCKECGIAFMNSSSLLNHHKVHAGKQPYRCIECGKFLKKHSTFINHQRIHSREKPHKCIECGKTFRKNSILLSHQRIHTGQKPYKCNDCGKAFAQNAALTRHERIHSGEKPFKCNKCGRAFRDNSTVLEHQKIHTGEKPYQCNECGKAFRKSSTLISHQRMHTGEKPYHCSKCGKSFRYSSSFAGHQKTHSGNKPYQCRDCGKAFTKSSTLTGHQRIHTGEKPYHCKKCGKAFRHSSGLVEHQRLHTGEKPYKCNECGKAFPRSSALKQHKKIHNKERAMKCS

SEQ ID NO: 16195 - protein, 463 aa, Homo sapiens
MPGPLRSLEMESLQFRDVAVEFSLEEWHCLDTAQQNLYRDVMLENYRHLVFLGIIVSKPDLITCLEQGIKPLTMKRHEMIAKPPVVCSHFAQDLWPEQSIKDSYQKVILRKFEKCGHGNLHFKKGCESVDECKLHKRGYNGLNQCLTTTQSKIFQCGKYVKVFHQFSNSKRHKRRHTEKKPLKYIEGDKAFNQSSTHTTHKKIDTGEKPYKCEECGKAFNRSSHLTTHKITHTREKPYKCEECGKVFKYFSSFTTHKKIHSGEKPYICEECGKAFMYPYTLTTHKIIHTGEQPYKCKECDKAFNHPATLSSHKKIHTGEKPYTCDKCGKAFISSSILSKHEKIHTGEKPYKCEECGKAFTRSSHLTMHKIIHTGEKPYKCEECGKAFTWSAGLHKHRRTHTGEKPYKCEECGKAYTTSSNLTEHKTTHTGEKPYKCKECGKAFNWSSDLNKHKRIHIGQKPRT

SEQ ID NO: 16196 - protein, 448 aa, Homo sapiens [sequence omitted]

SEQ ID NO: 16197 - protein, 340 aa, Homo sapiens; identical to SEQ ID NO: 14439

SEQ ID NO: 16198 - protein, 529 aa, Homo sapiens
MRRNSSLSFQMERPLEEQVQSKWSSSQGRTGTGGSDVLQMQNSEHHGQSIKTQTDSISLEDVAVNFTLEEWALLDPGQRNIYRDVMRATFKNLACIGEKWKDQDIEDEHKNQGRNLRSPMVEALCENKEDCPCGKSTSQIPDLNTNLETPTGLKPCDCSVCGEVFMHQVSLNRHMRSHTEQKPNECHEYGEKPHKCKECGKTFTRSSSIRTHERIHTGEKPYECKECGKAFAFLFSFRNHIRIHTGETPYECKECGKAFRYLTALRRHEKNHTGEKPYKCKQCGKAFIYYQPFLTHERTHTGEKPYECKQCGKAFSCPTYLRSHEKTHTGEKPFVCRECGRAFFSHSSLRKHVKTHTGVQPYTCKKCGEAFKSSSSCEVHERTHFGEKPYECKQCGKAFNSSSYLQLHERVHTGEKTYECKECGKAFLYSTHFRIHERTHTREKPYECKQCGRVFIYFSHLRRHERSHTGVKPCECKQCGKAFTCLNSLKVHKRIHTGERPFQCRQCGKAFSYSKSLHVHERTHSRQKP

SEQ ID NO: 16199 - protein, 437 aa, Homo sapiens
MGERLFESAEGSQCGETFTQVPEDMLNKKTLPGVKSCESGTCGEIFMGYSSFNRNIRTDTGHQPHKCQKFLEKPYKHKQRRKALSHSHCFRTHERPHTREKPFDCKECEKSFISPASIRRYMVTHSGDGPYKCKFCGKALDCLSLYLTHERTHTGEKRYECKQCGKAFSWHSSVRIHERTHTGEKPYECKECGKSFNFSSSFRRHERTHTGEKPYKCKECGKAFNCPSSFHRHERTHTGEKPYECKLYGKALSRLISFRRHMRMHTGERPHKCKICGKAFYSPSSFQRHERSHTGEKPYKCKQCGKAFTCSTSFQYHERTHTGEKPDGCKQCGKAFRSAKYIRIHGRTHTGEKPYECKQCGKAFHCVSSFHRHERTHAGEKPYECKHCGKAFTCSIYIRIHERIHTGEKPYQCKECGKAFIRSSYCRKHERTHTINI

SEQ ID NO: 16200 - protein, 531 aa, Homo sapiens
MLENYRNLVFVGIAASKPDLITCLEQGKEPWNVKRHEMVAEPPVVCSYFARDLWPKQGKKNYFQKVILRRYKKCGCENLQLRKYCKSMDECKVHKECYNGLNQCLTTTQNKIFQCDKYVKVFHKFSNSNRHTIRHTGKKSFKCKECEKSFCMLSHLAQHKRIHSGEKPYKCKECGKAYNETSNLSTHKRIHTGKKPYKCEECGKAFNRLSHLTTHKIIHTGKKPYKCEECGKAFNQSANLTTHKRIHTGEKPYKCEECGRAFSQSSTLTAHKIIHAGEKPYKCEECGKAFSQSSTLTTHKIIHTGEKFYKCEECGKAFSQLSHLTTHKRIHSGEKPYKCEECGKAFKQSSTLTTHKRIHAGEKFYKCEVCSKAFSRFSHLTTHKRIHTGEKPYKCEECGKAFNLSSQLTTHKIIHTGEKPYKCEECGKAFNQSSTLSKHKVIHTGEKPYKYEECGKAFNQSSHLTTHKMIHTGEKPYKCEECGKAFNNSSILNRHKMIHTGEKLYKPESCNNACDNIAKISKYKRNCAGEK

SEQ ID NO: 16201 - protein, 646 aa, Homo sapiens
MNECNVHKEGYNELNQYLTTTQSKIFQCDKYVKVFHKLLNSNRHNTKHTGKKPFKCKKCGKSFCMLLHLCQHKRIHIRENSYRCEECGKAFIWFSTLTRHRRVHTGEKSYKYECGKSFNQDSNLTTHKRIHTGQKPYKCEECGTSFYQFSYLTRHKLIHTREKPYKCEQYGKTFNQSSTLTGHKIIHNGEKPYKCEECGKAFSIFSTPTKHKIIHTEEKSHRCEEYCKAYKESSHLTTHKRIHTGEKPYKCEECGKAFSIFSTLTKHKIIHTEEKSHRCEECGKAYKESSHLTTHKRIHTGEKPYKCEECGKTFSVFSILTKHKIIHTEEKPYKCEECGKAFKRSSTLTKHRIIHTEEKPYKCEECGKAFNQSSTLSIHKIIHTGEKPYKCEECGKAFKRSSTLTIHKMIHTGEKPYKCEECGKAFNRSSHLTTHKRIHTGHKPYKCKECGKSFSVFSTLTKHKIIHTDKKPYKCEECGKAFNRSSILSIHKKIHTGEKPYKCEECGKAFKRSSHLAGHKQIHSVQKPYKCEECGKAFSIFSTLTKHKIIHTEEKPYKCEKCGKTFYRFSNLNTHKIIHTGEKPCKCEECGKAFNHSSNLIKHKLIHTGDKPYKCEACGKAFRRSSHLSRHKIIHIGIHTEETVQK

SEQ ID NO: 16202 - protein, 587 aa, Homo sapiens
MPTALCPRVLAPKESEEPRKMRSPPGENPSPQGELPSPESSRRLFRRFRYQEAAGPREALQRLWDLCGGWLRPERHTKEQILELLVLEQFLAILPREIQSWVRAQEPESGEQAVAAVEALEREPGRPWQWLKHCEDPVVIDDGDSPLDQEQEQLPVEPHSDLAKNQDAQPITLAQCLGLPSRPPSQLSGDPVLQDAFLLQEENVRDTQQVTTLQLPPSRVSPFKDMILCFSEEDWSLLDPAQTGFYGEFIIGEDYGVSMPPNDLAAQPDLSQGEENEPRVPELQDLQGKEVPQVSYLDSPSLQPFQVEERRKREELQVPEFQACPQTVVPQNTYPAGGNPRSLENSLDEEVTIEIVLSSSGDEDSQHGPYCTEELGSPTEKQRSLPASHRSSTEAGGEVQTSKKSYVCPNCGKIFRWRVNFIRHLRSRREQEKPHECSVCGELFSDSEDLDGHLESHEAQKPYRCGACGKSFRLNSHLLSHRRIHLQPDRLQPVEKREQAASEDADKGPKEPLENGKAKLSFQCCECGKAFQRHDHLARHRSHFHLKDKARPFQCRYCVKSFTQNYDLLRHERLHMKRRSKQALNSY

SEQ ID NO: 16203 - protein, 498 aa, Homo sapiens
MESPRGWTLQVAPEEGQVLCNVKTATRGLSEGAVSGGWGAWENSTEVPREAGDGQRQQATLGAADEQGGPGRELGPADGGRDGAGPRSEPADRALRPSPLPEEPGCRCGECGKAFSQGSYLLQHRRVHTGEKPYTCPECGKAFAWSSNLSQHQRIHSGEKPYACRECGKAFRAHSQLIHHQETHSGLKPFRCPDCGKSFGRSTTLVQHRRTHTGEKPYECPECGKAFSWNSNFLEHRRVHTGARPHACRDCGKAFSQSSNLAEHLKIHAGARPHACPDCGKAFVRVAGLRQHRRTHSSEKPFPCAECGKAFRESSQLLQHQRTHTGERPFECAECGQAFVMGSYLAEHRRVHTGEKPHACAQCGKAFSQRSNLLSHRRTHSGAKPFACADCGKAFRGSSGLAHHRLSHTGERPFACAECGKAFRGSSELRQHQRLHSGERPFVCAHCSKAFVRKSELLSHRRTHTGERPYACGECGKPFSHRCNLNEHQKRHGGRAAP

SEQ ID NO: 16204 - protein, 480 aa, Homo sapiens
MATVPGLQPLPTLEQDLEQEEILIVKVEEDFCLEEEPSVETEDPSPETFRQLFRLFCYQEVAGPREALSRLWELCCRWLRPELRTKEQILELLVLEQFLTVLPGEIQARVREQQPESGEEAVVLVEGLQRKPRKHRQRGSELLSDDEVPLGIGGQFLKHQAEAQPEDLSLEEEARFSSQQPPAQLSHRPQRGPLLWPERGPPAPRHQEMASASPFLSAWSQVPVNLEDVAVYLSGEEPRCMDPAQRDAPLENEGPGIQLEDGGDGREDAPLRMEWYRVLSARCQGPGHPLPGQRPAPVRGLVRPDQPRGGPPPGRRASHGADKPYTCPECGKGFSKTSHLTKHQRTHTGERPYKCLVCGKGFSDRSNFSTHQRVHTGEKPYPCPECGKRFSQSSSLVIHRRTHSGERPYACTQCGKRFNNSSHFSAHRRTHTGEKPYTCPACGRGFRRGTDLHKHQRTHMGAGSLPTLQPVAPGGPGAKA

SEQ ID NO: 16205 - protein, 271 aa, Homo sapiens
MNSSQISLRMKHGRVNMQKKPSKCSECGKFFTQRSSLTQHQRIHRGEKPYVCSECGSCFRKQSNLTQHLRIHTGEKPYKCNECEKAFQTKAILVQHLRIHTGEKPYKCNECGKAFCQSPSLIKHQRIHTGEKPYKCTECGKAFSQSICLTRHQRSHSGDKPFKCNECGKAFNQSACLMQHQRIHSGEKPYTCTECGKAFTQNSSLVEHERTHTGEKLYKCSECEKTFRKQAHLSEHYRIHTGEKPYECVGCGKSFRHSSALLRHQRLHAGE

SEQ ID NO: 16206 - protein, 544 aa, Homo sapiens
MLNMQGAEERDIRRETCPGWVNKNKPALEQDVCKIDSSGIVVKRFQEDEYQDSTFEEKYACEGMKENSPREIAESCLFQEGGFGRITFIHKEAPPEIISQGYNFEKSLLLTSSLVTRLRVSTEESLHQWETSNIQTNDISDQSKCPTLCTQKKSWKCNECGKTFTQSSSLTQHQRTHTGERPYTCEECGKAFSRSSFLVQHQRIHTGVKPYGCEQCGKTFRCRSFLTQHQRIHTGEKPYKCNECGNSFRNHSHLTEHQRIHTGEKPYKCNRCGKAFNQNTHLIHHQRIHTGEKPYICSECGSSFRKHSNLTQHQRIHTGEKPHKCDECGKTFQTKANLSQHQRIHSGEKPYKCKECGKAFCQSPSLIKHQRIHTGEKPYKCKECGKAFTQSTPLTKHQRIHTGERPYKCSECGKAFIQSICLIRHQRSHTGEKPYKCNECGKGFNQNTCLTQHMRIHTGEKPYKCKECGKAFAHSSSLTEHHRTHTGEKLYKCSECEKTFRKYAHLSEHYRIHTGEKPYECIECGKFFRHSSVLFRHQKLHSGD

SEQ ID NO: 16207 - protein, 646 aa, Homo sapiens
MSTAPSLSALRSSKHSGGGGGGGGGGGADPAWTSALSGNSSGPGPGSSPAGSTKPFVHAVPPSDPLRQANRLPIKVLKMLTARTGHILHPEYLQPLPSTPVSPIELDAKKSPLALLAQTCSQIGKPDPSPSSKLSSVASNGGGAGGAGGGAAGDKDTKSGPLKLSDIGVEDKSSFKPYSKPGSDKKEPGGGGGGGGGGGGGGGGVSSEKSGFRVPSATCQPFTPRTGSPSSSASACSPGGMLSSAGGAPEGKDDKKDTDVGGGGKGTGGASAEGGPTGLAHGRISCGGGINVDVNQHPDGGPGGKALGSDCGGSSGSSSGSGPSAPTSSSVLGSGLVAPVSPYKPGQTVFPLPPAGMTYPGSLAGAYAGYPPQFLPHGVALDPTKPGSLVGAQLAAAAAGSLGCSKPAGSSPLAGASPPSVMTASLCRDPYCLSYHCASHLAGAAAASASCAHDPAAAAAALKSGYPLVYPTHPLHGVHSSLTAAAAAGATPPSLAGHPLYPYGFMLPNDPLPHICNWVSANGPCDKRFATSEELLSHLRTHTAFPGTDKLLSGYPSSSSLASAAAAAMACHMHIPTSGAPGSPGTLALRSPHHALGLSSRYHPYSKSPLPTPGAPVPVPAATGPYYSPYALYGQRLTTASALGYQ

SEQ ID NO: 16208 - protein, 444 aa, Homo sapiens
MGPLQFRDVAIEFSLEEWHCLDAAQRNLYRDVMLENYRNLIFLGIVVSKPNLITCLEQGKKPLTMKRHEMIAKPPVMYSHFAQDLWSEQSIKDSFQKVILRRYEKCRHDNLQLKKGCESVDECPVHKRGYNGLKQCLATTQRKIFQCDEYVKFLHKFSNSNKHKIRDTGKKSFKCIEYGKTFNQSSTRTTYKKIDAGEKRYKCEECGKAYKQSSHLTTHKKIHTGEKPYKCEECGKAYKQSCNLTTHKIIHTGEKPYRCRECGKAFNHPATLFSHKKIHTGEKPYKCDKCGKAFISSSTLTKHEIIHTGEKPYKCEECGKAFNRSSNLTKHKRIHTGDVPYKCDECGKTFTWYSSLSKHKRAHTGEKPYKCEECGKAFTAFSTLTEHKIIHTGEKPYKCEECGKAFNWSSALNKHKKIHIRQKPCIVKNVENLLNVPQPLISIR

SEQ ID NO: 16209 - protein, 953 aa, Homo sapiens
MEESSSVAMLVPDIGEQEAILTAESIISPSLEIDEQRKTKPDPLIHVIQKLSKIVENEKSQKCLLIGKKRPRSSAATHSLETQELCEIPAKVIQSPAADTRRAEMSQTNFTPDTLAQNEGKAMSYQCSLCKFLSSSFSVLKDHIKQHGQQNEVILMCSECHITSRSQEELEAHVVNDHDNDANIHTQSKAQQCVSPSSSLCRKTTERNETIPDIPVSVDNLQTHTVQTASVAEMGRRKWYAYEQYGMYRCLFCSYTCGQQRMLKTHAWKHAGEVDCSYPIFENENEPLGLLDSSAAAAPGGVDAVVIAIGESELSIHNGPSVQVQICSSEQLSSSSPLEQSAERGVHLSQSVTLDPNEEEMLEVISDAEENLIPDSLLTSAQKIISSSPNKKGHVNVIVERLPSAEETLSQKRFLMNTEMEEGKDLSLTEAQIGREGMDDVYRADKCTVDIGGLIIGWSSSEKKDELMNKGLATDENAPPGRRRTNSESLRLHSLAAEALVTMPIRAAELTRANLGHYGDINLLDPDTSQRQVDSTLAAYSKMMSPLKNSSDGLTSLNQSNSTLVALPEGRQELSDGQVKTGISMSLLTVIEKLRERTDQNASDDDILKELQDNAQCQPNSDTSLSGNNVVEYIPNAERPYRCRLCHYTSGNKGYIKQHLRVHRQRQPYQCPICEHIADNSKDLESHMIHHCKTRIYQCKQCEESFHYKSQLRNHEREQHSLPDTLSIATSNEPRISSDTADGKCVQEGNKSSVQKQYRCDVCDYTSTTYVGVRNHRRIHNSDKPYRCSLCGYVCSHPPSLKSHMWKHASDQNYNYEQVNKAINDAISQSGRVLGKSPGKTQLKSSEESADPVTGSSENAVSSSELMSQTPSEVLGTNENEKLSPTSNTSYSLEKISSLAPPSMEYCVLLFCCCICGFESTSKENLLDHMKEHEGEIVNIILNKDHNTALNTN

SEQ ID NO: 16210 - protein, 683 aa, Homo sapiens
MSPHPEAITDCVTLNTVGQLAEGGYPLRFSTLFQEQQKMNISQASVSFKDVTIEFTQEEWQQMAPVQKNLYRDVMLENYSNLVSVGYCCFKPEVIFKLEQGEEPWFSEEEFSNQSHPKDYRGDDLIKQNKKIKDKHLEQAICINNKTLTTEEEKVLGKPFTLHVAAVASTKMSCKCNSWEVNLQSISEFIINNRNYSTKKIGCGNVCENSPFKINFEKTQTGEKFYEHNKNMKALNYNENLPKHPKFQTLEQAFECNKIGKAFNDKANCVKHNSSHTGETSSKDDEFRKNCDKKTLFDHRRTGTGKKHLHLNQCGKSFEKSTVEEYNKLNMGIKHYELNPSGNNFNRKAHLTDPQTAVIEENPLVSNDRTQTWVKSSEYHENKKSYQTSVHRVRRRSHSMMKPYKCNECGKSFCQKGHLIQHQRTHTGEKPFECSECGKTFSQKSHLSTHQRIHTAEKPYKCNECGKTFVQKSTLRGHQRIHTGEKPYECSECGKTFVQKSTLRDHHRIHTGEKSFQCNQCGKTFGQKSNLRIHQRTHTGEKTYQCNECEKSFWRKDHLIQHQKTHTGEKPFKCNECGKTFARTSTLRVHQRIHTGEKPFKCNECGKKFVRKAILSDHQRIHTGEKPFQCNKCGKTFGQKSNLRIHQRTHSGEKSYECNEYGKLCKKSTLSLYQKIQGEGNPY

SEQ ID NO: 16211 - protein, 262 aa, Homo sapiens; identical to SEQ ID NO: 14441

SEQ ID NO: 16212 - protein, 567 aa, Homo sapiens
MSSRLGAVPATSGPTTFKQQRSTRIVGAKNSRTQCSIKDNSFQYTIPHDDSLSGSSSASSCEPVSDFPASFRKSTYWMKMRRIKPAATSHVEGSGGVSAKGKRKPRQEEDEDYREFPQKKHKLYGRKQRPKTQPNPKSQARRIRKEPPVYAAGSLEEQWYLEIVDKGSVSCPTCQAVGRKTIEGLKKHMENCKQEMFTCHHCGKQLRSLAGMKYHVMANHNSLPILKAGDEIDEPSERERLRTVLKRLGKLRCMRESCSSSFTSIMGYLYHVRKCGKGAAELEKMTLKCHHCGKPYRSKAGLAYHLRSEHGPISFFPESGQPECLKEMNLESKSGGRVQRRSAKIAVYHLQELASAELAKEWPKRKVLQDLVPDDRKLKYTRPGLPTFSQEVLHKWKTDIKKYHRIQCPNQGCEAVYSSVSGLKAHLGSCTLGNFVAGKYKCLLCQKEFVSESGVKYHINSVHAEDWFVVNPTTTKSFEKLMKIKQRQQEEEKRRQQHRSRRSLRRRQQPGIELPETELSLRVGKDQRRNNEELVVSASCKEPEQEPVPAQFQKVKPPKTNHKRGRK

SEQ ID NO: 16213 - protein, 892 aa, Homo sapiens
MTDPFCVGGRRLPGSSKSGPGKDGSRKEVRLPMLHDPPKMGMPVVRGGQTVPGQAPLCFDPGSPASDKTEGKKKGRPKAENQALRDIPLSLMNDWKDEFKAHSRVKCPNSGCWLEFPSIYGLKYHYQRCQGGAISDRLAFPCPFCEAAFTSKTQLEKHRIWNHMDRPLPASKPGPISRPVTISRPVGVSKPIGVSKPVTIGKPVGVSKPIGISKPVSVGRPMPVTKAIPVTRPVPVTKPVTVSRPMPVTKAMPVTKPITVTKSVPVTKPVPVTKPITVTKLVTVTKPVPVTKPVTVSRPIVVSKPVTVSRPIAISRHTPPCKMVLLTRSENKAPRATGRNSGKKRAADSLDTCPIPPKQARPENGEYGPSSMGQSSAFQLSADTSSGSLSPGSRPSGGMEALKAAGPASPPEEDPERTKHRRKQKTPKKFTGEQPSISGTFGLKGLVKAEDKARVHRSKKQEGPGPEDARKKVPAAPITVSKEAPAPVAHPAPGGPEEQWQRAIHERGEAVCPTCNVVTRKTLVGLKKHMEVCQKLQDALKCQHCRKQFKSKAGLNYHTMAEHSAKPSDAEASEGGEQEERERLRKVLKQMGRLRCPQEGCGAAFSSLMGYQYHQRRCGKPPCEVDSPSFPCTHCGKTYRSKAGHDYHVRSEHTAPPPEEPTDKSPEAEDPLGVERTPSGRVRRTSAQVAVFHLQEIAEDELARDWTKRRMKDDLVPETARLNYTRPGLPTLNPQLLEAWKNEVKEKGHVNCPNDCCEAIYSSVSGLKAHLASCSKGAHLAGKYRCLLCPKEFSSESGVKYHILKTHAENWFRTSADPPPKHRSQDSLVPKKEKKKNLAGGKKRGRKPKERTPEEPVAKLPPRRDDWPPGCRDKGARGSTGRKVGVSKAPEK

SEQ ID NO: 16214 - protein, 541 aa, Homo sapiens
MPRRKQSHPQPVKCEGVKVDTEDSLDEGPGALVLESDLLLGQDLEFEEEEEEEEGDGNSDQLMGFERDSEGDSLGARPGLPYGLSDDESGGGRALSAESEVEEPARGPGEARGERPGPACQLCGGPTGEGPCCGAGGPGGGPLLPPRLLYSCRLCTFVSHYSSHLKRHMQTHSGEKPFRCGRCPYASAQLVNLTRHTRTHTGEKPYRCPHCPFACSSLGNLRRHQRTHAGPPTPPCPTCGFRCCTPRPARPPSPTEQEGAVPRRPEDALLLPDLSLHVPPGGASFLPDCGQLRGEGEGLCGTGSEPLPELLFPWTCRGCGQELEEGEGSRLGAAMCGRCMRGEAGGGASGGPQGPSDKGFACSLCPFATHYPNHLARHMKTHSGEKPFRCARCPYASAHLDNLKRHQRVHTGEKPYKCPLCPYACGNLANLKRHGRIHSGDKPFRCSLCNYSCNQSMNLKRHMLRHTGEKPFRCATCAYTTGHWDNYKRHQKVHGHGGAGGPGLSASEGWAPPHSPPSVLSSRGPPALGTAGSRAVHTDSS

SEQ ID NO: 16215 - protein, 400 aa, Homo sapiens
MTFEDVAVEFSQWEWGQLNPAQKDLYREVMLENFRNLAILGLLVSKPYVICQLEEGGEPFMVEREISTGAHSDWKRRSKSKESMPSWGISKEELFQVVSVEKHIQDVLQFSKLKAACGCDGQLEMQQIKQERHLKQMSTIHKSATTLSRDYKWNGFGRSLGLRSVLVNQHSILMGEGSYKCDTEFRQTLGGNNSQRTHPEKKSCKCNECGKSFHFQSELRRHQRCHTGEKPYECSDCGRAFGHISSLIKHQRTHTGEKPYECSECGRAFSQSSSLVLHYRFHTGEKPYKCNECGRAFGHTSSLIKHQRTHTGEKPYECRECGRTFSQSSSLIVHYRFHTGEKPYKCNKCGRAFSQSSSLTQHYRFHTGEKPYKCNECGRAFAHTASLIKHQRSHAGKKTL

SEQ ID NO: 16216 - protein, 1163 aa, Homo sapiens
MDRNREAEMELRRGPSPTRAGRGHEVDGDKATCHTCCICGKSFPFQSSLSQHMRKHTGEKPYKCPYCDHRASQKGNLKIHIRSHRTGTLIQGHEPEAGEAPLGEMRASEGLDACASPTKSASACNRLLNGASQADGARVLNGASQADSGRVLLRSSKKGAEGSACAPGEAKAAVQCSFCKSQFERKKDLELHVHQAHKPFKCRLCSYATLREESLLSHIERDHITAQGPGSGEACVENGKPELSPGEFPCEVCGQAFSQTWFLKAHMKKHRGSFDHGCHICGRRFKEPWFLKNHMKAHGPKTGSKNRPKSELDPIATINNVVQEEVIVAGLSLYEVCAKCGNLFTNLDSLNAHNAIHRRVEASRTRAPAEEGAEGPSDTKQFFLQCLNLRPSAAGDSCPGTQAGRRVAELDPVNSYQAWQLATRGKVAEPAEYLKYGAWDEALAGDVAFDKDRREYVLVSQEKRKREQDAPAAQGPPRKRASGPGDPAPAGHLDPRSAARPNRRAAATTGQGKSSECFECGKIFRTYHQMVLHSRVHRRARRERDSDGDRAARARCGSLSEGDSASQPSSPGSACAAADSPGSGLADEAAEDSGEEGAPEPAPGGQPRRCCFSEEVTSTELSSGDQSHKMGDNASERDTGESKAGIAASVSILENSSRETSRRQEQHRFSMDLKMPAFHPKQEVPVPGDGVEFPSSTGAEGQTGHPAEKLSDLHNKEHSGGGKRALAPDLMPLDLSARSTRDDPSNKETASSLQAALVVHPCPYCSHKTYYPEVLWMHKRIWHRVSCNSVAPPWIQPNGYKSIRSNLVFLSRSGRTGPPPALGGKECQPLLLARFTRTQVPGGMPGSKSGSSPLGVVTKAASMPKNKESHSGGPCALWAPGPDGYRQTKPCHGQEPHGAATQGPLAKPRQEASSKPVPAPGGGGFSRSATPTPTVIARAGAQPSANSKPVEKFGVPPAGAGFAPTNKHSAPDSLKAKFSAQPQGPPPAKGEGGAPPLPPREPPSKAAQELRTLATCAAGSRGDAALQAQPGVAGAPPVLHSIKQEPVAEGHEKRLDILNIFKTYIPKDFATLYQGWGVSGPGLEHRGTLRTQARPGEFVCIECGKSFHQPGHLRAHMRAHSVVFESDGPRGSEVHTTSADAPKQGRDHSNTGTVQTVPLRKGT

SEQ ID NO: 16217 - protein, 492 aa, Homo sapiens
MAMALPMPGPQEAVVFEDVAVYFTRIEWSCLAPDQQALYRDVMLENYGNLASLGFLVAKPALISLLEQGEEPGALILQVAEQSVAKASLCTDSRMEAGIMESPLQRKLSRQAGLPGTVWGCLPWGHPVGGHPAPPHPHGGPEDGSDKPTHPRAREHSASPRVLQEDLGRPVGSSAPRYRCVCGKAFRYNSLLLRHQIIHTGAKPFQCTECGKAFKQSSILLRHQLIHTEEKPFQCGECGKAFRQSTQLAAHHRVHTRERPYACGECGKAFSRSSRLLQHQKFHTGEKPFACTECGKAFCRRFTLNEHGRIHSGERPYRCLRCGQRFIRGSSLLKHHRLHAQEGAQDGGVGQGALLGAAQRPQAGDPPHECPVCGRPFRHNSLLLLHLRLHTGEKPFECAECGKAFGRKSNLTLHQKIHTKEKPFACTECGKAFRRSYTLNEHYRLHSGERPYRCRACGRACSRLSTLIQHQKVHGREPGEDTEGRRAPCWAS

SEQ ID NO: 16218 - protein, 1483 aa, Homo sapiens
MPSEQKQLFCDEKQTTLKKDYDVKNEIVDRSAPKPKISGSIHYALKNVKIDLPKINIPNEVLLKHEVDKYRKLFQSKQQTARKSISIKTVSCVEECTLLHKSERAEEEGVKMSAKILNFSCLKCRDNTRYSPNDLQKHFQMWHHGELPSYPCEMCNFSANDFQVFKQHRRTHRSTLVKCDICNNESVYTLLNLTKHFTSTHCVNGNFQCEKCKFSTQDVGTFVQHIHRHNEIHYKCGKCHHVCFTKGELQKHLHIHSGTFPFTCQYCSYGATRREHLVRHVITLHKEHLYAKEKLEKDKYEKRMAKTSAGLKLILKRYKIGASRKTFWKRKKINSGSDRSIEKNTQVLKKMNKTQTKSEDQSHVVQEHLSEEKDERLHCENNDKAPESESEKPTPLSTGQGNRAEEGPNASSGFMKTAVLGPTLKNVMMKNNKLAVSPNYNATFMGFKMMDGKQHIVLKLVPIKQNVCSPGSQSGAAKDGTANLQPQTLDTNGFLTGVTTELNDTVYMKAATPFSCSSSILSGKASSEKEMTLISQRNNMLQTMDYEKSVSSLSATSELVTASVNLTTKFETRDNVDFWGNHLTQSHPEVLGTTIKSPDKVNCVAKPNAYNSGDMHNYCINYGNCELPVESSNQGSLPFHNYSKVNNSNKRRRFSGTAVYENPQRESSSSKTVVQQPISESFLSLVRQESSKPDSLLASISLLNDKDGTLKAKSEIEEQYVLEKGQNIDGQNLYSNENQNLECATEKSKWEDFSNVDSPMMPRITSVFSLQSQQASEFLPPEVNQLLQDVLKIKPDVKQDSSNTPNKGLPLHCDQSFQKHEREGKIVESSKDFKVQGIFPVPPGSVGINVPTNDLNLKFGKEKQVSSIPQDVRDSEKMPRISGFGTLLKTQSDAIITQQLVKDKLRATTQNLGSFYMQSPLLNSEQKKTIIVQTSKGFLIPLNITNKPGLPVIPGNALPLVNSQGIPASLFVNKKPGMVLTLNNGKLEGVSAVKTEGAPARGTVTKEPCKTPILKVEPNNNCLTPGLCSSIGSCLSMKSSSENTLPLKGPYILKPTSSVKAVLIPNMLSEQQSTKLNISDSVKQQNEIFPKPPLYTFLPDGKQAVFLKCVMPNKTELLKPKLVQNSTYQNIQPKKPEGTPQRILLKIFNPVLNVTAANNLSVSNSASSLQKDNVPSNQIIGGEQKEPESRDALPFLLDDLMPANEIVITSTATCPESSEEPICVSDCSESRVLRCKTNCRIERNFNRKKTSKKIFSKTKTHGSKDSETAFVSRNRNCKRKCRDSYQEPPRRKATLHRKCKEKAKPEDVRETFGFSRPRLSKDSIRTLRLFPFSSKQLVKCPRRNQPVVVLNHPDADAPEVVSVMKTIAKFNGHVLKVSLSKRTINALLKPVCYNPPKTTYDDFSKRHKTFKPVSSVKERFVLKLTLKKTSKNNYQIVKTTSENILKAKFNCWFCGRVFDNQDTWAGHGQRHLMEATRDWNMLE

SEQ ID NO: 16219 - protein, 1074 aa, Homo sapiens
MKDIGQQLYTTHLNGGHNSLTMSPKQPDANGAPRPNRQEAQTLLYQGSEAEAAMMTIATCAKCKSVHKISLQDLQKGTGKDGMYVCFQCSLGAAPPNFHFVSNNSSATHVGNKTENFSSSVNSKFKVRNFKPGKYYCDKCRFSTKDPLQYKKHTLQHEEIKFICSHCSYISYTKGEFQRHLVKHTGIFPYQCEYCDYGAIRNDYIVKHTKRVHERAGAKRPVKAVAKLEPKRTGTSKQNPELLKASNPRTTFQNKWSDQLSGFSLHANKDKMHNIMLLPEPKEYQKDVVCIPNKMTLSEPNEVNLFENKNVEVEVLSPAKEPVQPGMPLTVVAPAELVVPANCLAQLIDVKVVNGTQQLVLKLFPLEENNCLEAGRDNGGNSERMVKEKGSNEQEKVLSAEKTKSLTVDGNVGKLVGIDSFQPSVQKQLKNVKWVRSYDFIMPNSSVHNNGKSFINSETIEDFQKKNNLYPHRTAFPSVALKGHSLASVFKNSVLRSLGAASNPFPYKAAVCFAESGRNLHSSSQQLLPFAASPATCSFSGEKGLLPVSENDLESTSKVNIPVKVVSSNRKQEDNQTEEHKAVSTVGQISSQHKSEYLHINITGEDRSQQPGDKPLELKNSERTNNTNDGPVISSVFSLSSGSENVPEGIKWNSSTSKIKSIELLRRKIAQLIESCGKPSSLASNSAHRRSVGQASKGTSKATSEGIQEINVSLTGLGHSTGTLQKPPNDGGITGNRQLTHQQIYPHFADGSNRKTKSRVARKAHVATPVLIPKGAVLRVLNSSENAHIIEATCEAPVSIPCSERQLIKPVPFCPVRQADSDLQPLRSERGPIDMSPNIETPLRPKLRKESAVCSTIHRKTGLLYGQQGSSELNKQGRLLSRSLSISRNKTKQVHLSRKKNKIQAEPSRCLKDPSIFQVARQLRLIAAKPDQLIKCPRRNQPVIVLNHPDVDSPEVTNVMKVINKYKGNVLKVVLSERTRCQLGIRRHHVRLTYQNAEEASQIKRQMMLKMKLKKVHKNNYQVVDSLPDDSSQCVFKCWFCGRLYEDQEEWMSHGQRHLIEATRDWDVLSSKGK

SEQ ID NO: 16220 - protein, 540 aa, Homo sapiens
MELLTFRDVAIEFSPEEWKCLDPAQQNLYRDVMLENYRNLVSLAVYSYYNQGILPEQGIQDSFKKATLGRYGSCGLENICLWKNWESIGEGEGQKECYNLCSQYLTTSHNKHLTVKGDKEYRIFQKKPQFLSAAPTEPCIPMNKYQHKFLKSVFCNKNQINFNHDSNISKHHSTHFLENYYNCNECEKVFYQSSKLIFPENIHIQKKPYNSNECGETSDPFSKLTQHQRIYIGESSQRCNKKCIIVFSQSHLKGHKIINTGEKSVKYKERGKAFTRGLHLGHQKIHTGEKPYKCKKCDKAFNKSSHLAQHQRIHTGEKPFKCKECGKAFNRGSYLTQHQRIHTGERAFKCEECGKAFNRGSYLTQHQRIHTGEKPFRCKECGKAFNRSSYVTQHQRMHTGEKPFKCKECGKAFNRASHLTQHQRIHTGEKHFKCKECGKAFNRGSHLTRHQRIHTGEKSFKCEECGKAFIWGSHLTQHQRVHTGEKFFKCKECGKAFTRSSHLTQHQRIHTGEKPFKCKECGKAFNRRSTLTQHQIIHTR

SEQ ID NO: 16221 - protein, 1311 aa, Homo sapiens
MSRRKQAKPRSLKDPNCKLEDKTEDGEALDCKKRPEDGEELEDEAVHSCDSCLQVFESLSDITEHKINQCQLTDGVDVEDDPTCSWPASSPSSKDQTSPSHGEGCDFGEEEGGPGLPYPCQFCDKSFSRLSYLKHHEQSHSDKLPFKCTYCSRLFKHKRSRDRHIKLHTGDKKYHCSECDAAFSRSDHLKIHLKTHTSNKPYKCAICRRGFLSSSSLHGHMQVHERNKDGSQSGSRMEDWKMKDTQKCSQCEEGFDFPEDLQKHIAECHPECSPNEDRAALQCVYCHELFVEETSLMNHMEQVHSGEKKNSCSICSESFHTVEELYSHMDSHQQPESCNHSNSPSLVTVGYTSVSSTTPDSNLSVDSSTMVEAAPPIPKSRGRKRAAQQTPDMTGPSSKQAKVTYSCIYCNKQLFSSLAVLQIHLKTMHLDKPEQAHICQYCLEVLPSLYNLNEHLKQVHEAQDPGLIVSAMPAIVYQCNFCSEVVNDLNTLQEHIRCSHGFANPAAKDSNAFFCPHCYMGFLTDSSLEEHIRQVHCDLSGSRFGSPVLGTPKEPVVEVYSCSYCTNSPIFNSVLKLNKHIKENHKNIPLALNYIHNGKKSRALSPLSPVAIEQTSLKMMQAVGGAPARPTGEYICNQCGAKYTSLDSFQTHLKTHLDTVLPKLTCPQCNKEFPNQESLLKHVTIHFMITSTYYICESCDKQFTSVDDLQKHLLDMHTFVFFRCTLCQEVFDSKVSIQLHLAVKHSNEKKVYRCTSCNWDFRNETDLQLHVKHNHLENQGKVHKCIFCGESFGTEVELQCHITTHSKKYNCKFCSKAFHAIILLEKHLREKHCVFETKTPNCGTNGASEQVQKEEVELQTLLTNSQESHNSHDGSEEDVDTSEPMYGCDICGAAYTMETLLQNHQLRDHNIRPGESAIVKKKAELIKGNYKCNVCSRTFFSENGLREHMQTHLGPVKHYMCPICGERFPSLLTLTEHKVTHSKSLDTGNCRICKMPLQSEEEFLEHCQMHPDLRNSLTGFRCVVCMQTVTSTLELKIHGTFHMQKTGNGSAVQTTGRGQHVQKLYKCASCLKEFRSKQDLVKLDINGLPYGLCAGCVNLSKSASPGINVPPGTNRPGLGQNENLSAIEGKGKVGGLKTRCSSCNVKFESESELQNHIQTIHRELVPDSNSTQLKTPQVSPMPRISPSQSDEKKTYQCIKCQMVFYNEWDIQVHVANHMIDEGLNHECKLCSQTFDSPAKLQCHLIEHSFEGMGGTFKCPVCFTVFVQANKLQQHIFSAHGQEDKIYDCTQCPQKFFFQTELQNHTMTQHSS

SEQ ID NO: 16222 - protein, 264 aa, Homo sapiens
MDTPSPDPLPSPLPGEEEKPLALSPPVPRGRRGRRPGGATSSNRTLKASLPRKRGRPPKSGQEPPLVQVQGVTAPVGSSGGSDLLLIDDQGVPYTVSEGSAAGPEGSGPRKAPHFCPVCLRAFPYLSDLERHSISHSELKPHQCKVCGKTFKRSSHLRRHCNIHAGLRPFRCPLCPRRFREAGELAHHHRVHSGERPYQCPICRLRFTEANTLRRHAKRKHPEAMGVPLCAPDPGSEPPWDEEGIPATAGAEEEEETEGKGEPA

SEQ ID NO: 16223 - protein, 670 aa, Homo sapiens
MAEVVAEVAEMPTQMSPGAVEMSTPMSAEMMEMSTEVTEMTPGEALASSLFFQHHQFMCSECGSLYNTLEEVLSHQEQHMLAVSEEEALTTQNVGLEPELVPGAEGPFQCGECSQLILSPGELLAHQDAHLRESANQIQYQCWDCQELFPSPELWVAHRKAQHLSATVAEPPVPPPLPPPTPLPPPSPPSEVKMEPYECPECSTLCATPEEFLEHQGTHFDSLEKEERNGLEEEEEDDEEDEEDDEEMEDEEAMAEVGDDAVGGDESTAGWAQGCGDCPQHQPSAGARRQHRRTAHSPASATHPFHCSQCQRSFSSANRLQAHGRAHVGGTHECTTCSKVFKKAASLEQHLRLHRGEARYLCVDCGRGFGTELTLVAHRRAHTANPLHRCRCGKTFSNMTKFLYHRRTHAGKSGAPPTGATAPPAPAEPTPPPPPPAPPAQLPCPQCSKSFASASRLSRHRRAVHGPPERRHRCGVCGKGFKKLIHVRNHLRTHTGERPFQCHSCGKTFASLANLSRHQLTHTGARPYQCLDCGKRFTQSSNLQQHRRLHLRPVAFARAPRLPITGLYNKSPYYCGTCGRWFRAMAGLRLHQRVHARARTLTLQPPRSPSPAPPPPPEPQQTIMCTELGETIAIIETSQPLALEDTLQLCQAALGASEAGGLLQLDTAFV

SEQ ID NO: 16224 - protein, 609 aa, Homo sapiens
MAVGLCKAMSQGLVTFRDVALDFSQEEWEWLKPSQKDLYRDVMLENYRNLVWLGLSISKPNMISLLEQGKEPWMVERKMSQGHCADWESWCEIEELSPKWFIDEDEISQEMVMERLASHGLECSSFREAWKYKGEFELHQGNAERHFMQVTAVKEISTGKRDNEFSNSGRSIPLKSVFLTQQKVPTIQQVHKFDIYDKLFPQNSVIIEYKRLHAEKESLIGNECEEFNQSTYLSKDIGIPPGEKPYESHDFSKLLSFHSLFTQHQTTHFGKLPHGYDECGDAFSCYSFFTQPQRIHSGEKPYACNDCGKAFSHDFFLSEHQRTHIGEKPYECKECNKAFRQSAHLAQHQRIHTGEKPFACNECGKAFSRYAFLVEHQRIHTGEKPYECKECNKAFRQSAHLNQHQRIHTGEKPYECNQCGKAFSRRIALTLHQRIHTGEKPFKCSECGKTFGYRSHLNQHQRIHTGEKPYECIKCGKFFRTDSQLNRHHRIHTGERPFECSKCGKAFSDALVLIHHKRSHAGEKPYECNKCGKAFSCGSYLNQHQRIHTGEKPYECSECGKAFHQILSLRLHQRIHAGEKPYKCNECGNNFSCVSALRRHQRIHNRETL

SEQ ID NO: 16225 - protein, 628 aa, Homo sapiens
MALTQGPLKFMDVAIEFSQEEWKCLDPAQRTLYRDVMLENYRNLVSLGICLPDLSVTSMLEQKRDPWTLQSEEKIANDPDGRECIKGVNTERSSKLGSNAGNKPCKNQLGFTFQLHLSDLQLFQAERKISGCKHFEKPVSDNSSVSPLEKISSSVKSHLLNKYRNNFDHAPLLPQEQKAHIREKAYKCNEHGQVFRASASLTNQVIHNADNPYKCSECGKVFSCSSKLVIHRRMHTGEKPYKCHECGKLFSSNSNLSQHQRIHTGEKPYKCHECDKVFRSSSKLAQHQRIHTGEKPYKCHECDKVFNQIAHLVRHQKIHTGEKPYSCNKCGKVFSRHSYLAEHQTVHTGEKPYKCEECGKAFSVRSSLITHQLIHTGRKPYKCKECDKVFGRKCFLTSHQRIHTRERPYGCSQCGKIFSQKSDLIRHRKTHTDEKPYKCNKCGTAFREFSDLTAHFLIHSGEKPYECKECGKVFRYKSSLTSHHRIHTGEKPYKCNRCGKVFSRSSNLVCHQKIHTGEKPYKCNQCGKVFNQASYLTRHQIIHTGERPYRCSKCGKAFRGCSGLTAHLAIHTEKKSHECKECGKIFTQKSSLTNHHRIHIGEKPYKCTLCSKVFSHNSDLAQHQRVHS

SEQ ID NO: 16226 - protein, 563 aa, Homo sapiens
MANSSFIGDHVHGAPHAVMPEVEFPDQFFTVLTMDHELVTLRDVVINFSQEEWEYLDSAQRNLYWDVMMENYSNLLSLDLESRNETKHLSVGKDIIQNTGSQWEVMESSKLCGLEGSIFRNDWQSKSKIDLQGPEVGYFSQMKIISENVPSYKTHESLTLPRRTHDSEKPYEYKEYEKVFSCDLEFDEYQKIHTGGKNYECNQCWKTFGIDNSSMLQLNIHTGVKPCKYMEYGNTCSFYKDFNVYQKIHNEKFYKCKEYRRTFERVGKVTPLQRVHDGEKHFECSFCGKSFRVHAQLTRHQKIHTDEKTYKCMECGKDFRFHSQLTEHQRIHTGEKPYKCMHCEKVFRISSQLIEHQRIHTGEKPYACKECGKAFGVCRELARHQRIHTGKKPYECKACGKVFRNSSSLTRHQRIHTGEKPYKCKECEKAFGVGSELTRHERIHSGQKPYECKECGKFFRLTSALIQHQRIHSGEKPYECKVCGKAFRHSSALTEHQRIHTGEKPYECKACGKAFRHSSSFTKHQRIHTDDKPYECKECGNSFSVVGHLTCQPKIYTGEKSFD

SEQ ID NO: 16227 - protein, 599 aa, Homo sapiens
MAAALRAPTQQVFVAFEDVAIYFSQEEWELLDEMQRLLYRDVMLENFAVMASLGCWCGAVDEGTPSAESVSVEELSQGRTPKADTSTDKSHPCEICTPVLRDILQMIELHASPCGQKLYLGGASRDFWMSSNLHQLQKLDNGEKLFKVDGDQASFMMNCRFHVSGKPFTFGEVGRDFSATSGLLQHQVTPTIERPHSRIRHLRVPTGRKPLKYTESRKSFREKSVFIQHQRADSGERPYKCSECGKSFSQSSGFLRHRKAHGRTRTHECSECGKSFSRKTHLTQHQRVHTGERPYDCSECGKSFRQVSVLIQHQRVHTGERPYECSECGKSFSHSTNLYRHRSAHTSTRPYECSECGKSFSHSTNLFRHWRVHTGVRPYECSECGKAFSCNIYLIHHQRFHTGERPYVCSECGKSFGQKSVLIQHQRVHTGERPYECSECGKVFSQSSGLFRHRRAHTKTKPYECSECEKSFSCKTDLIRHQTVHTGERPYECSVCGKSFIRKTHLIRHQTVHTNERPYECDECGKSYSQSSALLQHRRVHTGERPYECRECGKSFTRKNHLIQHKTVHTGERPYECSECGKSFSQSSGLLRHRRVHVQ

SEQ ID NO: 16228 - protein, 1301 aa, Homo sapiens
MTMGDMKTPDFDDLLAAFDIPDMVDPKAAIESGHDDHESHMKQNAHGEDDSHAPSSSDVGVSVIVKNVRNIDSSEGGEKDGHNPTGNGLHNGFLTASSLDSYSKDGAKSLKGDVPASEVTLKDSTFSQFSPISSAEEFDDDEKIEVDDPPDKEDMRSSFRSNVLTGSAPQQDYDKLKALGGENSSKTGLSTSGNVEKNKAVKRETEASSINLSVYEPFKVRKAEDKLKESSDKVLENRVLDGKLSSEKNDTSLPSVAPSKTKSSSKLSSCIAAIAALSAKKAASDSCKEPVANSRESSPLPKEVNDSPRAADKSPESQNLIDGTKKPSLKQPDSPRSISSENSSKGSPSSPAGSTPAIPKVRIKTIKTSSGEIKRTVTRVLPEVDLDSGKKPSEQTASVMASVTSLLSSPASAAVLSSPPRAPLQSAVVTNAVSPAELTPKQVTIKPVATAFLPVSAVKTAGSQVINLKLANNTTVKATVISAASVQSASSAIIKAANAIQQQTVVVPASSLANAKLVPKTVHLANLNLLPQGAQATSELRQVLTKPQQQIKQAIINAAASQPPKKVSRVQVVSSLQSSVVEAFNKVLSSVNPVPVYIPNLSPPANAGITLPTRGYKCLECGDSFALEKSLTQHYDRRSVRIEVTCNHCTKNLVFYNKCSLLSHARGHKEKGVVMQCSHLILKPVPADQMIVSPSSNTSTSTSTLQSPVGAGTHTVTKIQSGITGTVISAPSSTPITPAMPLDEDPSKLCRHSLKCLECNEVFQDETSLATHFQQAADTSGQKTCTICQMLLPNQCSYASHQRIHQHKSPYTCPECGAICRSVHFQTHVTKNCLHYTRRVGFRCVHCNVVYSDVAALKSHIQGSHCEVFYKCPICPMAFKSAPSTHSHAYTQHPGIKIGEPKIIYKCSMCDTVFTLQTLLYRHFDQHIENQKVSVFKCPDCSLLYAQKQLMMDHIKSMHGTLKSIEGPPNLGINLPLSIKPATQNSANQNKEDTKSMNGKEKLEKKSPSPVKKSMETKKVASPGWTCWECDCLFMQRDVYISHVRKEHGKQMKKHPCRQCDKSFSSSHSLCRHNRIKHKGIRKVYACSHCPDSRRTFTKRLMLEKHVQLMHGIKDPDLKEMTDATNEEETEIKEDTKVPSPKRKLEEPVLEFRPPRGAITQPLKKLKINVFKVHKCAVCGFTTENLLQFHEHIPQHKSDGSSYQCRECGLCYTSHVSLSRHLFIVHKLKEPQPVSKQNGAGEDNQQENKPSHEDESPDGAVSDRKCKVCAKTFETEAALNTHMRTHGMAFIKSKRMSSAEK

SEQ ID NO: 16229 - protein, 674 aa, Homo sapiens
MALTQGQLSFSDVAIEFSQEEWKCLDPGQKALYRDVMLENYRNLVSLGEDNVRPEACICSGICLPDLSVTSMLEQKRDPWTLQSEVKIINNPDGRECIKGVNTEKSSKLGSSAGNKSLKNQHGLTLQLHLTEWQPFQAVRNIYGCKHVEKSISDNSSVSPVQISFFSVKTHIFNNYRNDFLFSTLLPQEQKVHIREKPYGCNEHGKVFRVSSSLTNRQVIHIADKTYKCSDCGEIFSSNSNFAQHQRIHTGEKPYKYNECGKVFNQNSHLAQHQKIHTGQKPYNNKECGKVFSHHAYLAQHRKIHTGEKPYKCSECGKAFSVCSSLTAHLVIHTGEKPYDCKECGKVFRHKSSLTTHQTVHTGERPYKCNECGKGFSRIAFLARHRKVHTGEKPYKCNECGKVFIGNSRLARHRKIHTGGRRYKCNECGKAFRTCSDLTAHLLIHTGEKPYECIDCGKVFRHKSSLTYHCRIHTGEKPYKCNECGKVFSQNSNLQRHRKIHTGEKLYKCNECGKVFRQNSHLAQHRDIHTGEKPYSCNECGKVFRRNSHLVRHRNVHTGEKPYSCNECGKVFSRNSHLARHRNIHTGEKPHSCNECGKVFSRNSHLARHRKIHTGEKLYKCNECSKVFSRNSRLAQHRNIHTGVKPYSCNECGKVFSKNSILVQHCSIHTREKP

SEQ ID NO: 16230 - protein, 1300 aa, Homo sapiens
MEEASLCLGVSSAEPEAEPHLSGPVLNGQYAMSQKLHQITSQLSHAFPELHPRPNPEEKPPASLEEKAHVPMSGQPMGSQMALLANQLGREVDTSLNGRVDLQQFLNGQNLGIMSQMSDIEDDARKNRKYPCPLCGKRFRFNSILSLHMRTHTGEKPFKCPYCDHRAAQKGNLKIHLRTHKLGNLGKGRGRVREENRLLHELEERAILRDKQLKGSLLQPRPDLKPPPHAQQAPLAACTLALQANHSVPDVAHPVPSPKPASVQEDAVAPAAGFRCTFCKGKFKKREELDRHIRILHKPYKCTLCDFAASQEEELISHVEKAHITAESAQGQGPNGGGEQSANEFRCEVCGQVFSQAWFLKGHMRKHKDSFEHCCQICGRRFKEPWFLKNHMKVHLNKLSVKNKSPSDPEVPVPMGGMSQEAHANLYSRYLSCLQSGFMTPDKAGLSEPSQLYGKGELPMKEKEALGKLLSPISSMAHGVPEGDKHSLLGCLNLVPPLKSSCIERLQAAAKAAEMDPVNSYQAWQLMARGMAMEHGFLSKEHPLQRNHEDTLANAGVLFDKEKREYVLVGADGSKQKMPADLVHSTKVGSQRDLPSKLDPLESSRDFLSHGLNQTLEYNLQGPGNMKEKPTECPDCGRVFRTYHQVVVHSRVHKRDRKGEEDGLHVGLDERRGSGSDQESQSVSRSTTPGSSNVTEESGVGGGLSQTGSAQEDSPHPSSPSSSDIGEEAGRSAGVQQPALLRDRSLGSAMKDCPYCGKTFRTSHHLKVHLRIHTGEKPYKCPHCDYAGTQSASLKYHLERHHRERQNGAGPLSGQPPNQDHKDEMSSKASLFIRPDILRGAFKGLPGIDFRGGPASQQWTSGVLSSGDHSGQATGMSSEVPSDALKGTDLPSKSTHFSEIGRAYQSIVSNGVNFQGSLQAFMDSFVLSSLKKEKDMKDKALADPPSMKVHGVDGGEEKPSGKSSQRKSEKSQYEPLDLSVRPDAASLPGSSVTVQDSIAWHGCLFCAFTTSSMELMALHLQANHLGKAKRKDNTIGVTVNCKDQAREASKMALLPSLQSNKDLGLSNMISSLDSASEKMAQGQLKETLGEQKSGAWTGHVDPAFCNFPSDFYKQFGVYPGMVGSGASSSCPNKEPDGKAHSEEDVPILIPETTSKNTTDDLSDIASSEDMDSSKGENNDEEDVETEPEMMTKPLSALSKDSSSDGGDSLQPTGTSQPVQGLVSPLSQAPEKQWHSQGLLQAQDPLAGLPKPERGPQSLDKPMNMLSVLRAYSSDGLAAFNGLASSTANSGCIKRPDLCGK

SEQ ID NO: 16231 - protein, 660 aa, Homo sapiens
MAHALVTFRDVAIDFSQKEWECLDTTQRKLYRDVMLENYNNLVSLGYSGSKPDVITLLEQGKEPCVVARDVTGRQCPGLLSRHKTKKLSSEKDIHEISLSKESIIEKSKTLRLKGSIFRNEWQNKSEFEGQQGLKERSISQKKIVSKKMSTDRKRPSFTLNQRIHNSEKSCDSHLVQHGKIDSDVKHDCKECGSTFNNVYQLTLHQKIHTGEKSCKCEKCGKVFSHSYQLTLHQRFHTGEKPYECQECGKTFTLYPQLNRHQKIHTGKKPYMCKKCDKGFFSRLELTQHKRIHTGKKSYECKECGKVFQLIFYFKEHERIHTGKKPYECKECGKAFSVCGQLTRHQKIHTGVKPYECKECGKTFRLSFYLTEHRRTHAGKKPYECKECGKSFNVRGQLNRHKTIHTGIKPFACKVCEKAFSYSGDLRVHSRIHTGEKPYECKECGKAFMLRSVLTEHQRLHTGVKPYECKECGKTFRVRSQISLHKKIHTDVKPYKCVRCGKTFRFGFYLTEHQRIHTGEKPYKCKECGKAFIRRGNLKEHLKIHSGLKPYDCKECGKSFSRRGQFTEHQKIHTGVKPYKCKECGKAFSRSVDLRIHQRIHTGEKPYECKQCGKAFRLNSHLTEHQRIHTGEKPYECKVCRKAFRQYSHLYQHQKTHNVI

SEQ ID NO: 16232 - protein, 1346 aa, Homo sapiens
MDQYSLGDEGALPSEMHLPSFSESQGLNCSDTLNRDLGPNTRGFLYAGLSGLDPDPSLPTPDMSSEVLEDNLDTLSLYSGKDSDSVKLLEEYADSESQASLQDLGLGVLKAKEADEGGRATSGSARKGKRQHSSPQNPLLDCSLCGKVFSSASSLSKHYLTHSQERKHVCKICSKAFKRQDHLTGHMLTHQKTKPFVCIEQGCSKSYCDYRSLRRHYEVHHGLCILKEAPPEEEACGDSPHAHESAGQPPPSSLRSLVPPEARSPGSLLPHRDLLRRIVSSIVHQKTPSPGPAPAGASDSEGRNTACPCPASSGSSSCTPAGPHAAPAALDTELPEEPCLPQKEPATDVFTAPNSRAAENGAPDPPEPEPDTALLQARSTAECWPEGGSVPACLPLFRGQTVPASSQPSSHSFQWLRNLPGCPKSKGNNVFVVHKPSAVPSREGSESGPGPSSGSPSEESPPGPGGGLEDALPFPAALLRVPAEAPSDPRSASGEDDPCAPKKVKVDCDSFLCQNPGEPGLQEAQKAGGLPADASPLFRQLFLKSQEPLVSHEQMQVFQMITKSQRIFSHAQVAAVSSQLPAPEGKPAALRPLQGPWPQQPPPLAPAVDSLHAGPGNPEAEGSPARRRKTTPGVPREASPGSTRRDAKGGLKVAAVPTPLAAPSLDPSRNPDISSLAKQLRSSKGTLDLEDIFPSTGQRQTQLGGEEPPGASLPGKQAPAENGAASRITKGEKGPACSRGGGYRLLGNPRAPRFSGFRKEKAKMDMCCAASPSQVAMASFSSAGPPADPSKSKLTIFSRIQGGNIYRLPHPVKEENVAGRGNQQNGSPTDWTKPRSTFVCKNCSQMFYTEKGLSSHMCFHSDQWPSPRGKQEPQVFGTEFCKPLRQVLRPEGDRHSPPGTKKPLDPTAAAPLVVPQSIPVVPVTRHIGSMAMGQEKDGEERDSKESSQQRKRKKRPPPSTAGEPGPAGCHQSRLRSPMFLVDCLLKGLFQCSPYTPPPMLSPIREGSGVYFNTLCSTSTQASPDQLISSMLDQVDGSFGICVVKDDTKISIEPHINIGSRFQAEIPELQERSLAGTDEHVASLVWKPWGDMMISSETQDRVTELCNVACSSVMPGGGTNLELALHCLHEAQGNVQVALETLLLRGPHKPRTHLLADYRYTGSDVWTPIEKRLFKKAFYAHKKDFYLIHKMIQTKTVAQCVEYYYIWKKMIKFDCGRAPGLEKRVKREPEEVERTEEKVPCSPRERPSHHPTPKLKTKSYRRESILSSSPNAGSKRTPELLGSAESQGIFPCRECERVFDKIKSRNAHMKRHRLQDHVEPIIRVKWPVKPFQLKEEELGADIGPLQW

SEQ ID NO: 16233 - protein, 170 aa, Homo sapiens
MLENYQNLVWLGLSISKSVISLLEKRKLPWIMAKEEIRGPLPGYFKVSEMTISQEPKAKTRTLFGKDVPGAEIKELSAKRAINEVLSQFDTVIKCTRNVCKECGNLYCHNMQLTLHKRNHTQKKCNQCLDCGKYFTRQSTLIQHQRIHTGERPYKCNECIKTFNQRAHLT

SEQ ID NO: 16234 - protein, 600 aa, Homo sapiens
MAASAQVSVTFEDVAVTFTQEEWGQLDAAQRTLYQEVMLETCGLLMSLGCPLFKPELIYQLDHRQELWMATKDLSQSSYPGDNTKPKTTEPTFSHLALPEEVLLQEQLTQGASKNSQLGQSKDQDGPSEMQEVHLKIGIGPQRGKLLEKMSSERDGLGSDDGVCTKITQKQVSTEGDLYECDSHGPVTDALIREEKNSYKCEECGKVFKKNALLVQHERIHTQVKPYECTECGKTFSKSTHLLQHLIIHTGEKPYKCMECGKAFNRRSHLTRHQRIHSGEKPYKCSECGKAFTHRSTFVLHHRSHTGEKPFVCKECGKAFRDRPGFIRHYIIHTGEKPYECIECGKAFNRRSYLTWHQQIHTGVKPFECNECGKAFCESADLIQHYIIHTGEKPYKCMECGKAFNRRSHLKQHQRIHTGEKPYECSECGKAFTHCSTFVLHKRTHTGEKPYECKECGKAFSDRADLIRHFSIHTGEKPYECVECGKAFNRSSHLTRHQQIHTGEKPYECIQCGKAFCRSANLIRHSIIHTGEKPYECSECGKAFNRGSSLTHHQRIHTGRNPTIVTDVGRPFMTAQTSVNIQELLLGKEFLNITTEENLW

SEQ ID NO: 16235 - protein, 715 aa, Homo sapiens
MEARSMLVPPQASVCFEDVAMAFTQEEWEQLDLAQRTLYREVTLETWEHIVSLGLFLSKSDVISQLEQEEDLCRAEQEAPRDWKATLEENRLNSEKDRAREELSHHVEVYRSGPEEPPSLVLGKVQDQSNQLREHQENSLRFMVLTSERLFAQREHCELELGGGYSLPSTLSLLPTTLPTSTGFPKPNSQVKELKQNSAFINHEKNGADGKHCESHQCARAFCQSIYLSKLGNVETGKKNPYEYIVSGDSLNYGSSLCFHGRTFSVKKSDDCKDYGNLFSHSVSLNEQKPVHFGKSQYECDECRETCSESLCLVQTERSGPGETPFRCEERCAAFPMASSFSDCNIIQTTEKPSVCNQCGKSFSCCKLIHQRTHTGEKPFECTQCGKSFSQSYDLVIHQRTHTGEKPYECDLCGKSFTQRSKLITHQRIHTGEKPYQCIECRKSFRWNSNLIVHQRIHTGEKPYECTHCGKSFSQSYELVTHKRTHTGEKPFKCTQCGKSFSQKYDLVVHQRTHTGEKPYECNLCGKSFSQSSKLITHQRIHTGEKPYQCIECGKSFRWNSNLVIHQRIHTGEKPYDCTHCGKSFSQSYQLVAHKRTHTGEKPYECNECGKAFNRSTQLIRHLQIHTGEKPYKCNQCNKAFARSSYLVMHQRTHTGEKPFECSQCGKAFSGSSNLLSHHRIHSGEKPYECSDCGKSFRQQSQLVVHRRTHTGEKP

SEQ ID NO: 16236 - protein, 836 aa, Homo sapiens
MQVDPPLHGPPNDFLIFQIIPLHSLSIMPRFLWILCFSMEETQGELTSSCGSKTMANVSLAFRDVSIDLSQEEWECLDAVQRDLYKDVMLENYSNLVSLGYTIPKPDVITLLEQEKEPWIVMREGTRNWFTDLEYKYITKNLLSEKNVCKIYLSQLQTGEKSKNTIHEDTIFRNGLQCKHEFERQERHQMGCVSQMLIQKQISHPLHPKIHAREKSYECKECRKAFRQQSYLIQHLRIHTGERPYKCMECGKAFCRVGDLRVHHTIHAGERPYECKECGKAFRLHYHLTEHQRIHSGVKPYECKECGKAFSRVRDLRVHQTIHAGERPYECKECGKAFRLHYQLTEHQRIHTGERPYECKVCGKTFRVQRHISQHQKIHTGVKPYKCNECGKAFSHGSYLVQHQKIHTGEKPYECKECGKSFSFHAELARHRRIHTGEKPYECRECGKAFRLQTELTRHHRTHTGEKPYECKECGKAFICGYQLTLHLRTHTGEIPYECKECGKTFSSRYHLTQHYRIHTGEKPYICNECGKAFRLQGELTRHHRIHTCEKPYECKECGKAFIHSNQFISHQRIHTSESTYICKECGKIFSRRYNLTQHFKIHTGEKPYICNECGKAFRFQTELTQHHRIHTGEKPYKCTECGKAFIRSTHLTQHHRIHTGEKPYECTECGKTFSRHYHLTQHHRGHTGEKPYICNECGNAFICSYRLTLHQRIHTGELPYECKECGKTFSRRYHLTQHFRLHTGEKPYSCKECGNAFRLQAELTRHHIVHTGEKPYKCKECGKAFSVNSELTRHHRIHTGEKPYQCKECGKAFIRSDQLTLHQRNHISEEVLCIM

SEQ ID NO: 16237 - protein, 402 aa, Homo sapiens
MAEMNPAQGHVVFEDVAIYFSQEEWGHLDEAQRLLYRDVMLENLALLSSLGCCHGAEDEEAPLEPGVSVGVSQVMAPKPCLSTQNTQPCETCSSLLKDILRLAEHDGTHPEQGLYTCPAHLHQHQKEQIREKLSRGDGGRPTFVKNHRVHMAGKTFLCSECGKAFSHKHKLSDHQKIHTGERTYKCSKCGILFMERSTLNRHQRTHTGERPYECNECGKAFLCKSHLVRHQTIHSGERPYECSECGKLFMWSSTLITHQRVHTGKRPYGCSECGKFFKCNSNLFRHYRIHTGKRSYGCSECGKFFMERSTLSRHQRVHTGERPYECNECGKFFSLKSVLIQHQRVHTGERPYECSECGKAFLTKSHLICHQTVHTAAKQCSECGKFFRYNSTLLRHQKVHTG

SEQ ID NO: 16238 - protein, 533 aa, Homo sapiens
MNLTEGRVVFEDVAIYFSQEEWGHLDEAQRLLYRDVMLENLALLSSLGSWHGAEDEEAPSQQGFSVGVSEVTASKPCLSSQKVHPSETCGPPLKDILCLVEHNGIHPEQHIYICEAELFQHPKQQIGENLSRGDDWIPSFGKNHRVHMAEEIFTCMEGWKDLPATSCLLQHQGPQSEWKPYRDTEDREAFQTGQNDYKCSECGKTFTCSYSFVEHQKIHTGERSYECNKCGKFFKYSANFMKHQTVHTSERTYECRECGKSFMYNYRLMRHKRVHTGERPYECNTCGKFFRYSSTFVRHQRVHTGERPYECRECGKFFMDSSTLIKHQRVHTGERPYKCNDCGKFFRYISTLIRHQRIHTGERPYECSVCGELFRYNSSLVKHWRNHTGERPYKCSECGKSFRYHCRLIRHQRVHTGERPYECSECGKFFRYNSNLIKHWRNHTGERPYECRECGKAFSHKHILVEHQKIHSGERPYECSECQKAFIRKSHLVHHQKIHSEERLVCSMNVGNSLAKTPTSLNIRDFTMEKVYH

SEQ ID NO: 16239 - protein, 640 aa, Homo sapiens
MAEAALVITPQIPMVTEEFVKPSQGHVTFEDIAVYFSQEEWGLLDEAQRCLYHDVMLENFSLMASVGCLHGIEAEEAPSEQTLSAQGVSQARTPKLGPSIPNAHSCEMCILVMKDILYLSEHQGTLPWQKPYTSVASGKWFSFGSNLQQHQNQDSGEKHIRKEESSALLLNSCKIPLSDNLFPCKDVEKDFPTILGLLQHQTTHSRQEYAHRSRETFQQRRYKCEQVFNEKVHVTEHQRVHTGEKAYKRREYGKSLNSKYLFVEHQRTHNAEKPYVCNICGKSFLHKQTLVGHQQRIHTRERSYVCIECGKSLSSKYSLVEHQRTHNGEKPYVCNVCGKSFRHKQTFVGHQQRIHTGERPYVCMECGKSFIHSYDRIRHQRVHTGEGAYQCSECGKSFIYKQSLLDHHRIHTGERPYECKECGKAFIHKKRLLEHQRIHTGEKPYVCIICGKSFIRSSDYMRHQRIHTGERAYECSDCGKAFISKQTLLKHHKIHTRERPYECSECGKGFYLEVKLLQHQRIHTREQLCECNECGKVFSHQKRLLEHQKVHTGEKPCECSECGKCFRHRTSLIQHQKVHSGERPYNCTACEKAFIYKNKLVEHQRIHTGEKPYECGKCGKAFNKRYSLVRHQKVHITEEP

SEQ ID NO: 16240 - protein, 422 aa, Homo sapiens
MAETKDAAQMLVTFKDVAVTFTREEWRQLDLAQRTLYREVMLETCGLLVSLGHRVPKPELVHLLEHGQELWIVKRGLSHATCAGDRAQVHTREPTTYPPVLSERAFLRGSLTLESSTSSDSRLGRARDEEGLLEMQKGKVTPETDLHKETHLGKVSLEGEGLGTDDGLHSRALQEWLSADVLHECDSQQPGKDALIHAGTNPYKCKQCGKGFNRKWYLVRHQRVHTGMKPYECNACGKAFSQSSTLIRHYLIHTGEKPYKCLECGKAFKRRSYLMQHHPIHTGEKPYECSQCRKAFTHRSTFIRHNRTHTGEKPFECKECEKAFSNRAHLIQHYIIHTGEKPYDCMACGKAFRCSSELIQHQRIHTGEKPYECTQCGKAFHRSTYLIQHSVIHTGEMPYKCIECGKAFKRRSHLLQHQRVHT

SEQ ID NO: 16241 - protein, 407 aa, Homo sapiens
MAAAALRFPVQGTVTFEDVAVKFTQEEWNLLSEAQRCLYRDVTLENLALMSSLGCWCGVEDEAAPSKQSIYIQRETQVRTPMAGVSPKKAHPCEMCGPILGDILHVADHQGTHHKQKLHRCEAWGNKLYDSGNFHQHQNEHIGEKPYRGSVEEALFAKRCKLHVSGESSVFSESGKDFLLRSGLLQQEATHTGKSNSKTECVSLFHGGKSHYSCGGCMKHFSTKDILSQHERLLPTEEPSVWCECGKSSSKYDSFSNHQGVHTREKPYTCGICGKLFNSKSHLLVHQRIHTGEKPYECEVCQKFFRHKYHLIAHQRVHTGERPYECSDCGKSFTHSSTFRVHKRVHTGQKPYECSECGKSFAESSSLTKHRRVHTGEKPYGCSECEKKFRQISSLRHHQRVHKRKGL

SEQ ID NO: 16242 - protein, 538 aa, Homo sapiens
MVTCAHLGRRARLPAAQPSACPGTCFSQEERMAAGYLPRWSQELVTFEDVSMDFSQEEWELLEPAQKNLYREVMLENYRNVVSLEALKNQCTDVGIKEGPLSPAQTSQVTSLSSWTGYLLFQPVASSHLEQREALWIEEKGTPQASCSDWMTVLRNQDSTYKKVALQEEPASGINMIKLIREDGGWKQLEDSHEDPQGLLSQKASLHVVAVPQEKATAWHGFGENGNLSPALVLSQGSSKGNHLCGSELDITSLASDSVLNHHQLGYADRRPCESNECGNAIRQNSHFIQHGGKMFVYLENGQSLNHGMALTIHNKINTAEKPFECHQCGKVFNRRHSLSEHQRIHTGEKPYECQECGRAFTHSSTLTRHLRTHTGEKPYGCGECGKAFNRISSLTQHQRIHTGEKPYKCEDCGKSFCQSSYLILHKRTHTGEKPYECSECGKAFSDRSSLNQHERTHTGENPYECKQCGRAFSQRSSLVRHERTHTGEKPYRCQECGKAFSQSSSLVTHQKTHSSQKTYKIIDCGKAFYQNRHLIGY

SEQ ID NO: 16243 - protein, 628 aa, Homo sapiens
MDSVVFEDVAVDFTLEEWALLDSAQRDLYRDVMLETFQNLASVDDETQFKASGSVSQQDIYGEKIPKESKIATFTRNVSWASVLGKIWDSLSIEDQTTNQGRNLSRNHGLERLCESNDQCGEALSQIPHLNLYKKIPPGVKQYEYNTYGKVFMHRRTSLKSPITVHTGHKPYQCQECGQAYSCRSHLRMHVRTHNGERPYVCKLCGKTFPRTSSLNRHVRIHTAEKTYECKQCGKAFIDFSSLTSHLRSHTGEKPYKCKECGKAFSYSSTFRRHTITHTGEKPYKCKECAEAFSYSSTFRRHMISHTGEKPHKCKECGEAFSYSSAFRRHMITHTGEKPYECKQCGKTFIYLQSFRRHERIHTGEKPYECKQCGKTFIYPQSFRRHERTHGGEKPYECNQCGKAFSHPSSFRGHMRVHTGEKPYECKQCGKTFNWPISLRKHMRTHTREKPYECKQCGKAFSLSACFREHVRMHPEDKSYECKLCGKAFYCHISLQKHMRRHTAEKLYKCKQCGKAFSWPELLQQHVRTHTVEKPYECKECGKVFKWPSSLPIHMRLHTGEKPYQCKHCGKAFNCSSSLRRHVRIHTTEKQYKCNVGHPPANEFMCSASEKSHQERDLIKVVNMVLPL

SEQ ID NO: 16244 - protein, 456 aa, Homo sapiens
MDTVVFEDVVVDFTLEEWALLNPAQRKLYRDVMLETFKHLASVDNEAQLKASGSISQQDTSGEKLSLKQKIEKFTRKNIWASLLGKNWEEHSVKDKHNTKERHLSRNPRVERPCKSSKGNKRGRTFRKTRNCNRHLRKNCCTSVRRYECSQCGKLFTHSSSLIRHKRAHSGQKLYKCKECGKAFSRPSYLQTHEKTHSGEKPYACQSCGKTFLRSHSLTEHVRTHTGEKPYECGQCGKGFSCPKSFRAHVMMHAGGRPYECKHCGKAFRCQKSFRVHMIMHAGGRPYECKQCGKAYCWATSFQRHVRIHNGEKPYKCGKCGKAFGWPSSLHKHARTHAKKKPVSGGSVGKSSARPRPSTDVKSQTREKVYKCETCGKTYGWSSSLHKHERKHTGEKPVNAASVGKPSGGLCSSKNVRTQIGQKPSKCEKCGKAFSCPKAFQGHVRSHTGKKSCTSK

SEQ ID NO: 16245 - protein, 423 aa, Homo sapiens
MAAVVLPPTAASQREGHTEGGELVNELLKSWLKGLVTFEDVAVEFTQEEWALLDPAQRTLYRDVMLENCRNLASLGNQVDKPRLISQLEQEDKVMTEERGILSGTCPDVENPFKAKGLTPKLHVFRKEQSRNMKMERNHLGATLNECNQCFKVFSTKSSLTRHRKIHTGERPYGCSECGKSYSSRSYLAVHKRIHNGEKPYECNDCGKTFSSRSYLTVHKRIHNGEKPYECSDCGKTFSNSSYLRPHLRIHTGEKPYKCNQCFREFRTQSIFTRHKRVHTGEGHYVCNQCGKAFGTRSSLSSHYSIHTGEYPYECHDCGRTFRRRSNLTQHIRTHTGEKPYTCNECGKSFTNSFSLTIHRRIHNGEKSYECSDCGKSFNVLSSVKKHMRTHTGKKPYECNYCGKSFTSNSYLSVHTRMHNRQM

SEQ ID NO: 16246 - protein, 402 aa, Homo sapiens
MAAVILPSTAAPSSLFPASQQKGHTQGGELVNELLTSWLRGLVTFEDVAVEFTQEEWALLDPAQRTLYRDVMLENCRNLASLGCRVNKPSLISQLEQDKKVVTEERGILPSTCPDLETLLKAKWLTPKKNVFRKEQSKGVKTERSHRGVKLNECNQCFKVFSTKSNLTQHKRIHTGEKPYDCSQCGKSFSSRSYLTIHKRIHNGEKPYECNHCGKAFSDPSSLRLHLRIHTGEKPYECNQCFHVFRTSCNLKSHKRIHTGENHHECNQCGKAFSTRSSLTGHNSIHTGEKPYECHDCGKTFRKSSYLTQHVRTHTGEKPYECNECGKSFSSSFSLTVHKRIHTGEKPYECSDCGKAFNNLSAVKKHLRTHTGEKPYECNHCGKSFTSNSYLSVHKRIHNRWI

SEQ ID NO: 16247 - protein, 538 aa, Homo sapiens
MVAGWLTNYSQDSVTFEDVAVDFTQEEWTLLDQTQRNLYRDVMLENYKNLVAVDWESHINTKWSAPQQNFLQGKTSSVVEMERNHFGEELFDFNQCEKALSEHSCLKTHRRTYFRKKTCECNQCEKAFRKPSIFTLHKKTDIGEELPNCNQCETAFSQHLHLVCKKTSQNLHLVCKKTHTQEKPYKCSDCEKGLPSSSHLRECVRIYGGERPYTHKEYVETFSHSTALFVHMQTQDGEKFYECKACGKPFTESSYLTQHLRTHSRVLPIEHKKFGKAFAFSPDLAKHIRLRTRGKHYVCNECGKEFTCFSKLNIHIRVHTGEKPYECNKCGKAFTDSSGLIKHRRTHTGEKPYECKECGKAFANSSHLTVHMRTHTGEKPYQCKECGKAFINSSSFKSHMQTHPGVKPYDCQQCGKAFIRSSFLIRHLRSHSAERPFECEECGKAFRYSSHLSQHKRIHTGERPYKCQKCGQAFSISSGLTVHMRTHTGERPFECQECGKAFTRSTYLIRHLRSHSVEKPYKECGQTFSNSSCLTECV

SEQ ID NO: 16248 - protein, 161 aa, Homo sapiens
MGPLQFRDVAIEFSLEEWHCLDTAQWNLYRDVMLENYRHLVFLVCGKAFNSSSNLTTHKKIHTGEKPYRCEECGKAFKRSSHLTVHKIVHTGEKSYKCEECGKAFKHPSHVTAHKKIHTGGKPYKCEECGKDFKYTSTLIAHKRIHTGEKPYKCEECGKDF

SEQ ID NO: 16249 - protein, 790 aa, Homo sapiens
MAYCLTNCYQYSVTFEDTAVDFTQEEWILLDPVQRNLYRDVMLENYENVAKVGFQLFKPSVISWLEEEELRTLQQGVLQDWAIKHQTSVSALQQEFWKIQTSNGIQMDLVTFDSVAVEFTQEEWTLLDPAQRNLYSDVMLENYKNLSSVGYQLFKPSLISWLEEEEELSTLPRVLQEWKMCLKTKGPALWQDNFCLKTLNGIQLARNQNGEELYDCKQCEDVFCKHPCLKTNMSTQNRGNTSECIQYAKDLLSLYNKTSTIRKVSVFSKHGKSFRLILNVQVQRKCTQDKSFEGTDYGKAFIYQSYLEAHRKTQSGEKLNEWKQCGEAFTHSTSHAVNVETHIIKNPYECKECGKDFRYPTHLNNHMQTHIGIKPYKCKHCGKTFTVPSGFLEHVRTHTGEKPYGCKECGKAFGTSAGLIEHIRCHAREKTFKCDHCGKAFISYPSLFGHLRVHNGEKPYEHKEYGKAFGTSSGVIEDRRSNTGQKRFDCDQCGKVFVSFSSLFAHLRTHTGEKPFKCYKCGKPFTSSACLRIHMRTHTEERLYQCKKCGKAFTKCSYLTKHLRTHAGEKPYECMKCGKAFTERSYLTKHLRRHSGEKPYECKKCGKAFTERSDLTKHLRRHTGDKPYEYKDCGKAFVVSSSLVDHLRTHTGYKPYKCNACEKAYSRSCVLTQHLKTHAAEKTSECNACGNSFRNSMCFHDRLKTLTKIKPYKCKDCGKAFTCHSDLTNHVRIHTGEKPYKCKECGKAFRTSSGRIQHLRTHMGEKPFECDQCGKAFASFSARIAHLKTH

SEQ ID NO: 16250 - protein, 486 aa, Homo sapiens
MAAIYLSRGFFSREPICPFEEKTKVERMVEDYLASGYQDSVTFDDVAVDFTPEEWALLDTTEKYLYRDVMLENYMNLASVEWEIQPRTKRSSLQQGFLKNQIFSGIQMTRGYSGWKLCDCKNCGEVFREQFCLKTHMRVQNGGNTSEGNCYGKDTLSVHKEASTGQELSKFNPCGKVFTLTPGLAVHLEVLNARQPYKCKECGKGFKYFASLDNHMGIHTDEKLCEFQEYGRAVTASSHLKQCVAVHTGKKSKKTKKCGKSFTNFSQLYAPVKTHKGEKSFECKECGRSFRNSSCLNDHIQIHTGIKPHKCTYCGKAFTRSTQLTEHVRTHTGIKPYECKECGQAFAQYSGLSIHIRSHSGKKPYQCKECGKAFTTSTSLIQHTRIHTGEKPYECVECGKTFITSSRRSKHLKTHSGEKPFVCKICGKAFLYSSRLNVHLRTHTGEKPFVCKECGKAFAVSSRLSRHERIHTGEKPYECKDMSVTI

SEQ ID NO: 16251 - protein, 426 aa, Homo sapiens
MSAFDMSHGFFPREPICPFEEKTKIGTMVEDHRSNSYQDSVTFDDVAVEFTPEEWALLDTTQKYLYRDVMLENYMNLASVDFFFCLTSEWEIQPRTKRSSLQQGFLKNQIFTGIQMQTRSYSGWKLCENCGEVFSEQFCLKTHMRAQNGGNTFEGNCYGKDSISVHKEASIGQELSKFNPCGKVFTLTPGLAVHLEILNGRQPYKCKECGKGFKYFASLDNHMGIHIGEKLCEFQECERAITTSSHLKQCVAVHTGKKSEKTKNCGKSFTNFSQLSAHAKTHKGEKSFECKECGRSFRNSSSFNVHIQIHTGIKPHKCTECGKAFTRSTHLTQHVRTHTGIKPYECKECGQAFTQYTGLAIHIRNHTGEKPYQCKECGKAFNRSSTLTQHRRIHTGEKPYECVECGKTFITSSHRSKHLKTHSGER

SEQ ID NO: 16252 - protein, 476 aa, Homo sapiens
MDAVAFEDVAVNFTQEEWALLGPSQKNLYRYVMQETIRNLDCIRMIWEEQNTEDQYKNPRRNLRCHMVERFSESKDSSQCGETFSLIRDSIVNNSICPGEDPCQSAECEEVIMGHLSLNSHIRVDSGHKPHEYQEYGEKPHTHKQRGKAFSYHHSFQSRGRPHTGKKRYECKECGKTFSSRRNLRRHMVVQGGNRPYKCKLCGKAFFWPSLLRMHERTHTGEKPYECKQCSKAFPFYSSYRRHERMHTGEKPYECKQCSKALPDSSSYIRHERTHTGEKPYTCKQCGKAFSVSSSLRRHETTHSAEKPYECKQCGKTFHHLGSFQIHMKRHTGDRPHKCKICGKGFDRPSLVRYHERIHTGEKPYECKQCGKTLSHSSSFRRHMIMHTGGGPHKCKICGKAFVYPSVCQRHEKSHSGEKPYECKQCGKALSHSSSFRRHMVMHTGDGPNKCKVCGKAFVYPSVCQRHEKTHWRETI

SEQ ID NO: 16253 - protein, 553 aa, Homo sapiens
MDSVASEDVAVNFTLEEWALLDPSQKKLYRDVMRETFRNLACVGKKWEDQSIEDWYKNQGRILRNHMEEGLSESKEYDQCGEAFSQILNLNLNKKIPTIVRPCECSLCGKVFMHHSSLSRHIRSHLGHKPYDYQEYGEKPYKCKQCGKAFSSCQSFRRHERTHTGEKPYACPECGKAFISLPSVRRHMIKHTGDGPYKCQECGKAFDRPSLFQIHERTHTGEKPYECQECAKAFISLPSFQRHMIRHTGDGPYKCQECGKAFDRPSLFRIHERTHTGEKPHECKQCGKAFISFTNFQSHMIRHTGDGPYKCKVCGRAFIFPSYVRKHERTHTGEKPYECNKCGKTFSSSSNVRTHERTHTGEKPYECKECGKAFISLPSVRRHMIKHTGDGPYKCQVCGRAFDCPSSFQIHERTHTGEKPYECQVCGKAFISLKRIRKHMILHTGDGPYKCQVCGKAFDCPSSVRTHERTHTGEKPYECKECGKAFNYASSIRIHERTHTGEKPYECKQCGKTFSYSSSFQRHERAHNGDKPYVKNVGKLSFITQPSNTCENE

SEQ ID NO: 16254 - protein, 539 aa, Homo sapiens
MRRGPWERWSLASHRLDAGLCTCPREESREIRAGQIVLKAMAQGLVTFRDVAIEFSLEEWKCLEPAQRDLYREVTLENFGHLASLGLSISKPDVVSLLEQGKEPWMIANDVTGPWCPDLESRCEKFLQKDIFEIGAFNWEIMESLKCSDLEGSDFRADWECEGQFERQVNEECYFKQVNVTYGHMPVFQHHTSHTVRQSRETGEKLMECHECGKAFSRGSHLIQHQKIHTGEKPFGCKECGKAFSRASHLVQHQRIHTGEKPYDCKDCGKAFGRTSELILHQRLHTGVKPYECKECGKTFRQHSQLILHQRTHTGEKPYVCKDCGKAFIRGSQLTVHRRIHTGARPYECKECGKAFRQHSQLTVHQRIHTGEKPYECKECGKGFIHSSEVTRHQRIHSGEKPYECKECGKAFRQHAQLTRHQRVHTGDRPYECKDCGKAFSRSSYLIQHQRIHTGDKPYECKECGKAFIRVSQLTHHQRIHTCEKPYECRECGMAFIRSSQLTEHQRIHPGIKPYECRECGQAFILGSQLIEHYRIHTG

SEQ ID NO: 16255 - protein, 418 aa, Homo sapiens
MAQESVMFSDVSVDFSQEEWECLNDDQRDLYRDVMLENYSNLVSMGHSISKPNVISYLEQGKEPWLADRELTRGQWPVLESRCETKKLFLKKEIYEIESTQWEIMEKLTRRDFQCSSFRDDWECNRQFKKELGSQGGHFNQLVFTHEDLPTLSHHPSFTLQQIINSKKKFCASKEYRKTFRHGSQFATHEIIHTIEKPYECKECGKSFRHPSRLTHHQKIHTGKKPFECKECGKTFICGSDLTRHHRIHTGEKPYECKECGKAFSSGSNFTRHQRIHTGEKPYECKECGKAFSSGSNFTQHQRIHTGEKPYECKECGNAFSQSSQLIKHQRIHTGEKPYECKECEKAFRSGSDLTRHQRIHTGEKPYECKICGKAYSQSSQLISHHRIHTSEKPYEYRECGKNFNYDPQLIQHQNLYW

SEQ ID NO: 16256 - protein, 647 aa, Homo sapiens
MAQGSVSFNDVTVDFTQEEWQHLDHAQKTLYMDVMLENYCHLISVGCHMTKPDVILKLERGEEPWTSFAGHTCLEENWKAEDFLVKFKEHQEKYSRSVVSINHKKLVKEKSKIYEKTFTLGKNPVNSKNLPPEYDTHGRILKNVSELIISNLNPARKRLSEYNGYGKSLLSTKQETTHPEVKSHNQSARAFSHNEVLMQYQKTETPAQSFGYNDCEKSFLQRGGLITHSRPYKGENPSVYNKKRRATNIEKKHTCNECGKSFCRKSVLILHQGIHSEEKPYQCHQCGNAFRRKSYLIDHQRTHTGEKPFVCNECGKSFRLKTALTDHQRTHTGEKSYECLQCRNAFRLKSHLIRHQRTHTGEKPYECNDCGKSFRQKTTLSLHQRIHTGEKPYICKECGKSFHQKANLTVHQRTHTGEKPYICNECGKSFSQKTTLALHEKTHNEEKPYICSECGKSFRQKTTLVAHQRTHTGEKSYECPHCGKAFRMKSYLIDHHRTHTGEKPYECNECGKSFSQKTNLNLHQRIHTGEKPYVCNECGKSFRQKATLTVHQKIHTGQKSYECPQCGKAFSRKSYLIHHQRTHTGEKPYKCSECGKCFRQKTNLIVHQRTHTGEKPYVCNECGKSFSYKRNLIVHQRTHKGENIEMQ

SEQ ID NO: 16257 - protein, 644 aa, Homo sapiens
MTSQSSVISNSCVTMERLSHMMERKAWCSQESALSEEEEDTTRPLETVTFKDVAVDLTQEEWEQMKPAQRNLYRDVMLENYSNLVTVGCQVTKPDVIFKLEQEEEPWVMEEEMFGRHCPEVWEVDEQIKKQQETLVRKVTSISKKILIKEKVIECKKVAKIFPLSSDIVTSRQSFYDCDSLDKGLEHNLDLLRYEKGCVREKQSNEFGKPFYHCASYVVTPFKCNQCGQDFSHKFDLIRHERIHAGEKPYECKECGKAFSRKENLITHQKIHTGEKPYKCNECGKAFIQMSNLIRHHRIHTGEKPYACKDCWKAFSQKSNLIEHERIHTGEKPYECKECGKSFSQKQNLIEHEKIHTGEKPYACNECGRAFSRMSSVTLHMRSHTGEKPYKCNKCGKAFSQCSVFIIHMRSHTGEKPYVCSECGKAFSQSSSLTVHMRNHTAEKPYECKECGKAFSRKENLITHQKIHTGEKPYECSECGKAFIQMSNLIRHQRIHTGEKPYACTVCGKAFSQKSNLTEHEKIHTGEKPYHCNQCGKAFSQRQNLLEHEKIHTGEKPFKCNECGKAFSRISSLTLHVRSHTGEKPYECNKCGKAFSQCSLLIIHMRSHTGEKPFECNECGKAFSQRASLSIHKRGHTGERHQVY

SEQ ID NO: 16258 - protein, 686 aa, Homo sapiens
MTESQGTVTFKDVAIDFTQEEWKRLDPAQRKLYRNVMLENYNNLITVGYPFTKPDVIFKLEQEEEPWVMEEEVLRRHWQGEIWGVDEHQKNQDRLLRQVEVKFQKTLTEEKGNECQKKFANVFPLNSDFFPSRHNLYEYDLFGKCLEHNFDCHNNVKCLMRKEHCEYNEPVKSYGNSSSHFVITPFKCNHCGKGFNQTLDLIRHLRIHTGEKPYECSNCRKAFSHKEKLIKHYKIHSREQSYKCNECGKAFIKMSNLIRHQRIHTGEKPYACKECEKSFSQKSNLIDHEKIHTGEKPYECNECGKAFSQKQSLIAHQKVHTGEKPYACNECGKAFPRIASLALHMRSHTGEKPYKCDKCGKAFSQFSMLIIHVRIHTGEKPYECNECGKAFSQSSALTVHMRSHTGEKPYECKECRKAFSHKKNFITHQKIHTREKPYECNECGKAFIQMSNLVRHQRIHTGEKPYICKECGKAFSQKSNLIAHEKIHSGEKPYECNECGKAFSQKQNFITHQKVHTGEKPYDCNECGKAFSQIASLTLHLRSHTGEKPYECDKCGKAFSQCSLLNLHMRSHTGEKPYVCNECGKAFSQRTSLIVHMRGHTGEKPYECNKCGKAFSQSSSLTIHIRGHTGEKPFDCSKCGKAFSQISSLTLHMRKHTGEKPYHCIECGKAFSQKSHLVRHQRIHTH

SEQ ID NO: 16259 - protein, 555 aa, Homo sapiens
MDSVVFEDVAVDFTLEEWALLDSAQRDLYRDVMLETFRNLASVDDGTQFKANGSVSLQDMYGQEKSKEQTIPNFTGNNSCAYTLEKNCEGYGTEDHHKNLRNHMVDRFCTHNEGNQYGEAIHQMPDLTLHKKVSAGEKPYECTKCRTVFTHLSSLKRHVKSHCGRKAPPGEECKQACICPSHLHSHGRTDTEEKPYKCQACGQTFQHPRYLSHHVKTHTAEKTYKCEQCRMAFNGFASFTRHVRTHTKDRPYKCQECGRAFIYPSTFQRHMTTHTGEKPYKCQHCGKAFTYPQAFQRHEKTHTGEKPYECKQCGKTFSWSETLRVHMRIHTGDKLYKCEHCGKAFTSSRSFQGHLRTHTGEKPYECKQCGKAFTWSSTFREHVRIHTQEQLYKCEQCGKAFTSSRSFRGHLRTHTGEKPYECKQCGKTFTWSSTFREHVRIHTQEQLHKCEHCGKAFTSSRAFQGHLRMHTGEKPYECKQCGKTFTWSSTLHNHVRMHTGEKPHKCKQCGMSFKWHSSFRNHLRMHTGQKSHECQSYSKAFSCQVILSKTSESTH

SEQ ID NO: 16260 - protein, 536 aa, Homo sapiens; identical to SEQ ID NO: 14444

SEQ ID NO: 16261 - protein, 609 aa, Homo sapiens
MPHLLVTFRDVAIDFSQEEWECLDPAQRDLYRDVMLENYSNLISLDLESSCVTKKLSPEKEIYEMESLQWENMGKRINHHLQYNGLGDNMECKGNLEGQEASQEGLYMCVKITCEEKATESHSTSSTFHRIIPTKEKLYKCKECRQGFSYLSCLIQHEENHNIEKCSEVKKHRNTFSKKPSYIQHQRIQTGEKPYECMECGKAFGRTSDLIQHQKIHTNEKPYQCNACGKAFIRGSQLTEHQRVHTGEKPYECKKCGKAFSYCSQYTLHQRIHSGEKPYECKDCGKAFILGSQLTYHQRIHSGEKPYECKECGKAFILGSHLTYHQRVHTGEKPYICKECGKAFLCASQLNEHQRIHTGEKPYECKECGKTFFRGSQLTYHLRVHSGERPYKCKECGKAFISNSNLIQHQRIHTGEKPYKCKECGKAFICGKQLSEHQRIHTGEKPFECKECGKAFIRVAYLTQHEKIHGEKHYECKECGKTFVRATQLTYHQRIHTGEKPYKCKECDKAFIYGSQLSEHQRIHRGEKPYECKQCGKAFIRGSHLTEHLRTHTGEKPYECKECGRAFSRGSELTLHQRIHTGEKPYTCVQCGKDFRCPSQLTQHTRLHN

SEQ ID NO: 16262 - protein, 529 aa, Homo sapiens
MEQEKKLLVSDSNSFMERESLKSPFTGDTSMNNLETVHHNNSKADKLKEKPSEWSKRHRPQHYKHEDAKEMPLTWVQDEIWCHDSYESDGKSENWGNFIAKEEEKPNHQEWDSGEHTNACVQQNSSFVDRPYKCSECWKSFSNSSHLRTHQRTHSGEKPYKCSECAKCFCNSSHLIQHLRMHTGEKPYQCGECGKSFSNTSHLIIHERTHTGEKPYKCPECGKRFSSSSHLIQHHRSHTGEKPYECSVCGKGFSHSYVLIEHQRTHTGEKPYKCPDCGKSFSQSSSLIRHQRTHTGEKPYKCLECEKSFGCNSTLIKHQRIHTGEKPYQCPECGKNFSRSSNLITHQKMHTGEKSYESSEYEESLGQNCNVIEECRIQLGEKPYRCCECGKSFGLSSHLIRHQRTHTGEKPYRCSECWKTFSQSSTLVIHQRTHTGEKPYKCPDCGESFSQSFNLIRHRRTHIGEKPYKCTSCEKCFSRSAYLSQHRKIHVEKPFESPDVGDFPHEWTWKNCSGEMPFISSFSVSNSSS

SEQ ID NO: 16263 - protein, 665 aa, Homo sapiens
MFPVLEPHQVGLIRSYNSKTMTCFQELVTFRDVAIDFSRQEWEYLDPNQRDLYRDVMLENYRNLVSLGGHSISKPVVVDLLERGKEPWMILREETQFTDLDLQCEIISYIEVPTYETDISSTQLQSIYKREKLYECKKCQKKFSSGYQLILHHRFHVIERPYECKECGKNFRSGYQLTLHQRFHTGEKPYECTECGKNFRSGYQLTVHQRFHTGEKTYECRQCGKAFIYASHIVQHERIHTGGKPYECQECGRAFSQGGHLRIHQRVHTGEKPYKCKECGKTFSRRSNLVEHGQFHTDEKPYICEKCGKAFRRGHQLTVHQRVHTGKKPYECKECGKGYTTASYFLLHQRIHKGGKPYECKECKKTFTLYRNLTRHQNIHTGEKLFECKQCGKTYTTGSKLFQHQKTHTGEKPYECKECGKAFSLYGYLKQHQKIHTGMKHFECKECKKTFTLYRNLTRHQNIHTGKKLFECQECGKAYSTGSNLIQHRKTHTGEKPYKCKECGKTFSLHGYLNQHQKIHTGMKPYECKVCRKTFTFYRNLTLHQSIHTDEKPFECKECGKTFRRSSHLTAHQSIHADKKPYECKECGKAFKMYGYLTQHQKIHTGGKPYECKECGKAFSRASNLVQHERIHTGEKPYVCKQCGKTFRYGSALKAHQRIHRSIKV

SEQ ID NO: 16264 - protein, 896 aa, Homo sapiens
MTEESEETVLYIEHRYVCSECNQLYGSLEEVLMHQNSHVPQQHFELVGVADPGVTVATDTASGTGLYQTLVQESQYQCLECGQLLMSPSQLLEHQELHLKMMAPQEAVPAEPSPKAPPLSSSTIHYECVDCKALFASQELWLNHRQTHLRATPTKAPAPVVLGSPVVLGPPVGQARVAVEHSYRKAEEGGEGATVPSAAATTTEVVTEVELLLYKCSECSQLFQLPADFLEHQATHFPAPVPESQEPALQQEVQASSPAEVPVSQPDPLPASDHSYELRNGEAIGRDRRGRRARRNNSGEAGGAATQELFCSACDQLFLSPHQLQQHLRSHREGVFKCPLCSRVFPSPSSLDQHLGDHSSESHFLCVDCGLAFGTEALLLAHRRAHTPNPLHSCPCGKTFVNLTKFLYHRRTHGVGGVPLPTTPVPPEEPVIGFPEPAPAETGEPEAPEPPVSEETSAGPAAPGTYRCLLCSREFGKALQLTRHQRFVHRLERRHKCSICGKMFKKKSHVRNHLRTHTGERPFPCPDCSKPFNSPANLARHRLTHTGERPYRCGDCGKAFTQSSTLRQHRLVHAQHFPYRCQECGVRFHRPYRLLMHRYHHTGEYPYKCRECPRSFLLRRLLEVHQLVVHAGRQPHRCPSCGAAFPSSLRLREHRCAAAAAQAPRRFECGTCGKKVGSAARLQAHEAAHAAAGPGEVLAKEPPAPRAPRATRAPVASPAALGSTATASPAAPARRRGLECSECKKLFSTETSLQVHRRIHTGERPYPCPDCGKAFRQSTHLKDHRRLHTGERPFACEVCGKAFAISMRLAEHRRIHTGERPYSCPDCGKSYRSFSNLWKHRKTHQQQHQAAVRQQLAEAEAAVGLAVMETAVEALPLVEAIEIYPLAEAEGVQISG

SEQ ID NO: 16265 - protein, 245 aa, Homo sapiens
MLERGAESAAGATDPSPTGKEPVTKEAPHQGPPQKPSQSAPGPTASAGSPPRPRRRPPPQRPHRCPDCDKAFSYPSKLATHRLAHGGARPHPCPDCPKAFSYPSKLAAHRLTHSGARPHPCPHCPKSFGHRSKLAAHLWTHAPTRPYPCPDCPKSFCYPSKLAAHRHTHHATDARPYPCPHCPKAFSFPSKLAAHRLCHDPPTAPGSQATAWHRCSSCGQAFGQRRLLLLHQRSHHQVEHKGERD

SEQ ID NO: 16266 - protein, 715 aa, Homo sapiens
MSSPKRSSKPSMSLAPSGSSMPTADPKPPASLKSTKSATPNRSLVPTKPATSRNSVMSPSSSKSTKSTSTKRAPSNRPSSRSRVRSKARTPSRVSTDTRTSKASKASDVRCHQRRGTHSRGRTPGRRGSRSSKRSPSRASTPGRIRTHGARPGMASRVRTPTSQQKGSRGKSYGRPRTSNRERSDSQPRNLSKKSYRPPGGSGIGRSSELAVTPSTAKCQTPTGIPSKEKSDNPSPSSSRKVKSYGQMIIPSREKSYSPTEMSSRVKSYNQASTRSRPQSHSQSRSPRRSRSGSQKRTHSRVRSHSWKRNHSRARSRTRKGILSQMGRHSQSRSHSKGKSQNQSRTPRRGRSHNWSRNPSKERSHSHSRSSSKERDHRGSSSPRKESGRSQSGSPNKQRDHSRSRSPNKARDRSRSRSPYKARDRSRSRSPNKARDCSRSRSPYKARDRSRSRSPNKARDHSRSRSPNKARDRSRSRSPSKERDHSQLGSPSKERDHRRSRSPSKERQCRQSRSSSKERDHRRSRSPSKERQRRQSRSPNKERDRSQSRSPSEEREHRQSRSPSKERDRRRWRSPSKERERRQSRSSSEERDHSRSRSPNKQSGYSRPRASSKEKAHSRSRTPSKEGNHSQSRTSSKESDPSQSTVPRSPDWKRSPTRTSSLSQNRTPSKTSSHSPSTFPSGGQTLSQDDSQADATTSKATLPGERSSSSSSKLA

SEQ ID NO: 16267 - protein, 170 aa, Homo sapiens
MEDPNPEENMKQQDSPKERSPQSPGGNICHLGAPKCTRCLITFADSKFQERHMKREHPADFVAQKLQGVLFICFTCARSFPSSKALITHQRSHGPAAKPTLPVATTTAQPTFPCPDCGKTFGQAVSLRRHRQMHEVRAPPGTFACTECGQDFAQEAGLHQHYIRHARGEL

SEQ ID NO: 16268 - protein, 485 aa, Homo sapiens
MKNATIVMSVRREQGSSSGEGSLSFEDVAVGFTREEWQFLDQSQKVLYKEVMLENYINLVSIGYRGTKPDSLFKLEQGEPPGIAEGAAHSQICPGFVIQSRRYAGKDSDAFGGYGRSCLHIKRDKTLTGVKYHRCVKPSSPKSQLNDLQKICAGGKPHECSVCGRAFSRKAQLIQHQRTERGEKPHGCGECGKTFMRKIQLTEHQRTHTGEKPHECSECGKAFSRKSQLMVHQRTHTGEKPYRCSKCGKAFSRKCRLNRHQRSHTGEKLYGCSVCGKAFSQKAYLTAHQRLHTGDKPYKCSDCGRTFYFKSDLTRHQRIHTGEKPYECSECEKAFRSKSKLIQHQRTHTGERPYSCRECGKAFAHMSVLIKHEKTHIRETAINSLTVEKPSSRSHTSLYMSELIQEQKTVNTVPIEMPSSGTPPLLNKSERLVGRNVVIVEQPFPRNQAFVVNQEFEQRISLTNEVNVAPSVINYILYLTDIVSE

SEQ ID NO: 16269 - protein, 590 aa, Homo sapiens
MLHEEAAQKRKGKEPGMALPQGRLTFRDVAIEFSLAEWKFLNPAQRALYREVMLENYRNLEAVDISSKRMMKEVLSTGQGNTEVIHTGMLQRHESYHTGDFCFQEIEKDIHDFEFQSQKDERNGHEASMPKIKELMGSTDRHDQRHAGNKPIKDQLGLSFHLHLPELHIFQPEEKIANQVEKSVNDASSISTSQRISCRPETHTPNNYGNNFFHSSLLTQKQEVHMREKSFQCNETGEAFNCSSFVRKHQIIHLGEKQYKFDICGKVFNEKRYLARHRRCHTSEKPYKCNECGKSFSYKSSLTCHRRCHTGEKPYKCNECGKSFSYKSSLTCHHRCHTGEKPYKCNECGKSFSYKSSLRCHRRLHTGIKPYKCNECGKMFGQNSTLVIHKAIHTGEKPYKCNECGKAFNQQSHLSRHHRLHTGEKPYKCNDCGKAFIHQSSLARHHRLHTGEKSYKCEECDRVFSQKSNLERHKIIHTGEKPYKCNECHKTFSHRSSLPCHRRLHSGEKPYKCNECGKTFNVQSHLSRHHRLHTGEKPYKCKVCDKAFMCHSYLANHTRIHSGEKPYKCNECGKAHNHLIDSSIKPCMSS

SEQ ID NO: 16270 - protein, 562 aa, Homo sapiens
MDPQPPPPAQGSPPHRGRGRGRGRGRGRGRGRGRGGAGAPRAPLPCPTCGRLFRFPYYLSRHRLSHSGLRPHACPLCPKAFRRPAHLSRHLRGHGPQPPLRCAACPRTFPEPAQLRRHLAQEHAGGEVELAIERVAKETAEPSWGPQDEGSEPPTTAAAGATEEEAVAAWPETWPAGEPSTLAAPTSAAEPRESESEEAEAGAAELRAELALAAGRQEEKQVLLQADWTLLCLRCREAFATKGELKAHPCLRPEGEQEGEGGPPPRPKRHQCSICLKAFARPWSLSRHRLVHSTDRPFVCPDCGLAFRLASYLRQHRRVHGPLSLLAPLPAAGKKDDKASGARNSAKGPEGGEGAECGGASEGGEGQNGGDAAPARPPAGEPRFWCPECGKGFRRRAHLRQHGVTHSGARPFQCVRCQREFKRLADLARHAQVHAGGPAPHPCPRCPRRFSRAYSLLRHQRCHRAELERAAALQALQAQAPTSPPPPPPPLKAEQEEEGLPLPLANIKEEPPSPGTPPQSPPAPPVFLSASCFDSQDHSAFEMEEEEVDSKAHLRGLGGLAS

SEQ ID NO: 16271 - protein, 172 aa, Homo sapiens
MLLLPPRPPHPRSSSPEAMDPPPPKAPPFPKAEGPSSTPSSAAGPRPPRLGRHLLIDANGVPYTYTVQLEEEPRGPPQREAPPGEPGPRKGYSCPECARVFASPLRLQSHRVSHSDLKPFTCGACGKAFKRSSHLSRHRATHRARAGPPHTCPLCPRRFQDAAELAQHVRLH

SEQ ID NO: 16272 - protein, 197 aa, Homo sapiens
MLVLPSPCPQPLAFSSVETMEGPPRRTCRSPEPGPSSSIGSPQASSPPRPNHYLLIDTQGVPYTVLVDEESQREPGASGAPGQKKCYSCPVCSRVFEYMSYLQRHSITHSEVKPFECDICGKAFKRASHLARHHSIHLAGGGRPHGCPLCPRRFRDAGELAQHSRVHSGERPFQCPHCPRRFMEQNTLQKHTRWKHP

SEQ ID NO: 16273 - protein, 517 aa, Homo sapiens
MSLGSELFRDVAIVFSQEEWQWLAPAQRDLYRDVMLETYSNLVSLGLAVSKPDVISFLEQGKEPWMVERVVSGGLCPVLESRYDTKELFPKQHVYEVESPQWEIMESLTSYGLECSSFQDDWECRNQFDRQQGNPDRHFHQMIIRHEEMPTFDQHASLTFYQKIHTREKPFGYNKCRKDFWQKELLINHQGIYTNEKPYKCKECGKAFKYGSRLIQHENIHSGKKPYECKECGKAFNSGSNFIQHQRVHTGEKPYECKDCEKAFSRSSQLIEHQRTHTGEKPYQCKECGKAFNRISHLKVHYRIHTGEKPYACKECGKTFSHRSQLIQHQTVHTGRKLYECKECGKAFNQGSTLIRHQRIHTGEKPYECKVCGKAFRVSSQLKQHQRIHTGEKPYQCKVCGRAFKRVSHLTVHYRIHTGEKPYECKECGKAFSHCSQLIHHQVIHTEKKPYEYKECEKTLSHDSTTVQPQRMHNRETHVNIINVEKPSISSYPLLIIREFMLASNHMNGSNGESPLA

SEQ ID NO: 16274 - protein, 569 aa, Homo sapiens
MSKDLVTFGDVAVNFSQEEWEWLNPAQRNLYRKVMLENYRSLVSLGVSVSKPDVISLLEQGKEPWMVKKEGTRGPCPDWEYVFKNSEFSSKQETYEESSKVVTVGARHLSYSLDYPSLREDCQSEDWYKNQLGSQEVHLSQLIITHKEILPEVQNKEYNKSWQTFHQDTIFDIQQSFPTKEKAHKHEPQKKSYRKKSVEMKHRKVYVEKKLLKCNDCEKVFNQSSSLTLHQRIHTGEKPYACVECGKTFSQSANLAQHKRIHTGEKPYECKECRKAFSQNAHLAQHQRVHTGEKPYQCKECKKAFSQIAHLTQHQRVHTGERPFECIECGKAFSNGSFLAQHQRIHTGEKPYVCNVCGKAFSHRGYLIVHQRIHTGERPYECKECRKAFSQYAHLAQHQRVHTGEKPYECKVCRKAFSQIAYLDQHQRVHTGEKPYECIECGKAFSNSSSLAQHQRSHTGEKPYMCKECRKTFSQNAGLAQHQRIHTGEKPYECNVCGKAFSYSGSLTLHQRIHTGERPYECKDCRKSFRQRAHLAHHERIHTMESFLTLSSPSPSTSNQLPRPVGFIS

SEQ ID NO: 16275 - protein, 421 aa, Homo sapiens
MAGEAEAQLDPSLQGLVMFEDVTVYFSREEWGLLNVTQKGLYRDVMLENFALVSSLGLAPSRSPVFTQLEDDEQSWVPSWVDVTPVSRAEARRGFGLDGLCRVEDERAHPEHLKSYRVIQHQDTHSEGKPRRHTEHGAAFPPGSSCGQQQEVHVAEKLFKCSDCGKVFLKAFALLDHLITHSEERPFRCPTGRSAFKKSAHINPRKIHTGETAHVCNECGKAFSYPSKLRKHQKVHTGIKPFKCSDCGKTFNRKDALVLHQRIHTGERPYECSKCGKTFSVLSTLIRHRKVHIGERPYECTECGKFFKYNNSFILHQRVHTGERPFECKQCGKGYVTRSGLYQHWKVHTGERPYECSLCGKTFTTRSYRNRHQQFHTEERSYECTECGKAFKHSSTLLQHKKVHTPERRQEDRAHGKVVSC

SEQ ID NO: 16276 - protein, 769 aa, Homo sapiens
MPANWTSPQKSSALAPEDHGSSYEGSVSFRDVAIDFSREEWRHLDPSQRNLYRDVMLETYSHLLSVGYQVPEAEVVMLEQGKEPWALQGERPRQSCPGEKLWDHNQCRKILSYKQVSSQPQKMYPGEKAYECAKFEKIFTQKSQLKVHLKVLAGEKLYVCIECGKAFVQKPEFIIHQKTHMREKPFKCNECGKSFFQVSSLFRHQRIHTGEKLYECSQCGKGFSYNSDLSIHEKIHTGERHHECTDCGKAFTQKSTLKMHQKIHTGERSYICIECGQAFIQKTHLIAHRRIHTGEKPYECSNCGKSFISKSQLQVHQRVHTRVKPYICTEYGKVFSNNSNLVTHKKVQSREKSSICTECGKAFTYRSELIIHQRIHTGEKPYECSDCGKAFTQKSALTVHQRIHTGEKSYICMKCGLAFIQKAHLIAHQIIHTGEKPHKCGHCGKLFTSKSQLHVHKRIHTGEKPYMCNKCGKAFTNRSNLITHQKTHTGEKSYICSKCGKAFTQRSDLITHQRIHTGEKPYECNTCGKAFTQKSHLNIHQKIHTGERQYECHECGKAFNQKSILIVHQKIHTGEKPYVCTECGRAFIRKSNFITHQRIHTGEKPYECSDCGKSFTSKSQLLVHQPVHTGEKPYVCAECGKAFSGRSNLSKHQKTHTGEKPYICSECGKTFRQKSELITHHRIHTGEKPYECSDCGKSFTKKSQLQVHQRIHTGEKPYVCAECGKAFTDRSNLNKHQTTHTGDKPYKCGICGKGFVQKSVFSVHQSSHA

SEQ ID NO: 16277 - protein, 769 aa, Homo sapiens
MPASWTSPQKSSALAPEDHGSSYEGSVSFRDVAIDFSREEWRHLDLSQRNLYRDVMLETYSHLLSVGYQVPKPEVVMLEQGKEPWALQGERPRHSCPGEKLWDHNQHRKIIGYKPASSQDQKIYSGEKSYECAEFGKSFTWKSQFKVHLKVPTGEKLYVCIECGRAFVQKPEFITHQKTHMREKPYKCNECGKSFFQVSSLFRHHRIHTGEKLYECSECGKGFPYNSDLSIHEKIHTGERHHECTDCGKAFTQKSTLKIHQKIHTGERSYICIECGQAFIQKTQLIAHRRIHSGEKPYECNNCGKSFISKSQLQVHQRVHTRVKPYICTEYGKVFSNNSNLITHEKIQSREKSSICTECGKAFTYRSELIIHQRIHTGEKPYECSDCGRAFTQKSALTVHQRIHTGEKSYICMKCGLAFIRKAHLITHQIIHTGEKPYKCGHCGKLFTSKSQLHVHKRIHTGEKPYVCNKCGKAFTNRSNLITHQKTHTGEKSYICSKCGKAFTQRSDLITHQRIHTGEKPYECNTCGKAFTQKSNLNIHQKIHTGERQYECHECGKAFNQKSILIVHQKIHTGEKPYVCTECGRAFIRKSNFITHQRIHTGEKPYECSDCGKSFTSKSQLLVHQPVHTGEKPYVCAECGKAFSGRSNLSKHQKTHTGEKPYICSECGKTFRQKSELITHHRIHTGEKPYECSDCGKSFTKKSQLQVHQRIHTGEKPYVCAECGKAFSNRSNLNKHQTTHTGDKPYKCGICGKGFVQKSVFSVHQSSHA

SEQ ID NO: 16278 - protein, 402 aa, Homo sapiens
MAAAAALRAPAQSSVTFEDVAVNFSLEEWSLLNEAQRCLYRDVMLETLTLISSLGCWHGGEDEAAPSKQSTCIHIYKDQGGHSGERPYECGEYRKLFKNKSCLTEPRRDHKHRNVRTGERPYECSKYGKLFHQKPTLHIHERFHTGQKTYECSECGKSFHQSSSLLQRQTLHTRERPYECIECGKAFAEKSSLINHRKVHSGAKRYECNECGKSFAYTSSLIKHRRIHTGERPYECSECGRSFAENSSLIKHLRVHTGERPYECVECGKSFRRSSSLLQHQRVHTRERPYECSECGKSFSLRSNLIHHQRVHTGERHECGQCGKSFSRKSSLIIHLRVHTGERPYECSDCGKSFAENSSLIKHLRVHTGERPYECIDCGKSFRHSSSFRRHQRVHTGMRPYK

SEQ ID NO: 16279 - protein, 575 aa, Homo sapiens
MAAAVPRRPTQQGTVTFEDVAVNFSQEEWCLLSEAQRCLYRDVMLENLALISSLGCWCGSKDEEAPCKQRISVQRESQSRTPRAGVSPKKAHPCEMCGLILEDVFHFADHQETHHKQKLNRSGACGKNLDDTAYLHQHQKQHIGEKFYRKSVREASFVKKRKLRVSQEPFVFREFGKDVLPSSGLCQEEAAVEKTDSETMHGPPFQEGKTNYSCGKRTKAFSTKHSVIPHQKLFTRDGCYVCSDCGKSFSRYVSFSNHQRDHTAKGPYDCGECGKSYSRKSSLIQHQRVHTGQTAYPCEECGKSFSQKGSLISHQLVHTGEGPYECRECGKSFGQKGNLIQHQQGHTGERAYHCGECGKSFRQKFCFINHQRVHTGERPYKCGECGKSFGQKGNLVHHQRGHTGERPYECKECGKSFRYRSHLTEHQRLHTGERPYNCRECGKLFNRKYHLLVHERVHTGERPYACEVCGKLFGNKHSVTIHQRIHTGERPYECSECGKSFLSSSALHVHKRVHSGQKPYKCSECGKSFSECSSLIKHRRIHTGERPYECTKCGKTFQRSSTLLHHQSSHRRKAL

SEQ ID NO: 16280 - protein, 364 aa, Homo sapiens
MWAPREQLLGWTAEALPAKDSAWPWEEKPRYLGPVTFEDVAVLFTEAEWKRLSLEQRNLYKEVMLENLRNLVSLAESKPEVHTCPSCPLAFGSQQFLSQDELHNHPIPGFHAGNQLHPGNPCPEDQPQSQHPSDKNHRGAEAEDQRVEGGVRPLFWSTNERGALVGFSSLFQRPPISSWGGNRILEIQLSPAQNASSEEVDRISKRAETPGFGAVTFGECALAFNQKSNLFRQKAVTAEKSSDKRQSQVCRECGRGFSRKSQLIIHQRTHTGEKPYVCGECGRGFIVESVLRNHLSTHSGEKPYVCSHCGRGFSCKPYLIRHQRTHTREKSFMCTVCGRGFREKSELIKHQRIHTGDKPYVCRD

SEQ ID NO: 16281 - protein, 1267 aa, Homo sapiens
MGDMKTPDFDDLLAAFDIPDPTSLDAKEAIQTPSEENESPLKPPGICMDESVSLSHSGSAPDVPAVSVIVKNTSRQESFEAEKDHITPSLLHNGFRGSDLPPDPHNCGKFDSTFMNGDSARSFPGKLEPPKSEPLPTFNQFSPISSPEPEDPIKDNGFGIKPKHSDSYFPPPLGCGAVGGPVLEALAKFPVPELHMFDHFCKKEPKPEPLPLGSQQEHEQSGQNTVEPHKDPDATRFFGEALEFNSHPSNSIGESKGLARELGTCSSVPPRQRLKPAHSKLSSCVAALVALQAKRVASVTKEDQPGHTKDLSGPTKESSKGSPKMPKSPKSPRSPLEATRKSIKPSDSPRSICSDSSSKGSPSVAASSPPAIPKVRIKTIKTSSGEIKRTVTRILPDPDDPSKSPVGSPLGSAIAEAPSEMPGDEVPVEEHFPEAGTNSGSPQGARKGDESMTKASDSSSPSCSSGPRVPKGAAPGSQTGKKQQSTALQASTLAPANLLPKAVHLANLNLVPHSVAASVTAKSSVQRRSQPQLTQMSVPLVHQVKKAAPLIVEVFNKVLHSSNPVPLYAPNLSPPADSRIHVPASGYCCLECGDAFALEKSLSQHYGRRSVHIEVLCTLCSKTLLFFNKCSLLRHARDHKSKGLVMQCSQLLVKPISADQMFVSAPVNSTAPAAPAPSSSPKHGLTSGSASPPPPALPLYPDPVRLIRYSIKCLECHKQMRDYMVLAAHFQRTTEETEGLTCQVCQMLLPNQCSFCAHQRIHAHKSPYCCPECGVLCRSAYFQTHVKENCLHYARKVGYRCIHCGVVHLTLALLKSHIQERHCQVFHKCAFCPMAFKTASSTADHSATQHPTQPHRPSQLIYKCSCEMVFNKKRHIQQHFYQNVSKTQVGVFKCPECPLLFVQKPELMQHVKSTHGVPRNVDELSSLQSSADTSSSRPGSRVPTEPPATSVAARSSSLPSGRWGRPEAHRRVEARPRLRNTGWTCQECQEWVPDRESYVSHMKKSHGRTLKRYPCRQCEQSFHTPNSLRKHIRNNHDTVKKFYTCGYCTEDSPSFPRPSLLESHISLMHGIRNPDLSQTSKVKPPGGHSPQVNHLKRPVSGVGDAPGTSNGATVSSTKRHKSLFQCAKCSFATDSGLEFQSHIPQHQVDSSTAQCLLCGLCYTSASSLSRHLFIVHKVRDQEEEEEEEAAAAEMAVEVAEPEEGSGEEVPMETRENGLEECAGEPLSADPEARRLLGPAPEDDGGHNDHSQPQASQDQDSHTLSPQV

SEQ ID NO: 16282 - protein, 134 aa, Homo sapiens
MGRSRRTGAHRAHSLARQMKAKRRRPDLDEIHRELRPQGSARPQPDPNAEFDPDLPGGGLHRCLACARYFIDSTNLKTHFRSKDHKKRLKQLSVEPYSQEEAERAAGMGSYVPPRRLAVPTEVSTEVPEMDTST

SEQ ID NO: 16283 - protein, 807 aa, Homo sapiens
MKEWKSKMEISEEKKSARAASEKLQRQITQECELVETSNSEDRLLKHWVSPLKDAMRHLPSQESGIREMHIIPQKAIVGEIGHGCNEGEKILSAGESSHRYEVSGQNFKQKSGLTEHQKIHNINKTYECKECEKTFNRSSNLIIHQRIHTGNKPYVCNECGKDSNQSSNLIIHQRIHTGKKPYICHECGKDFNQSSNLVRHKQIHSGGNPYECKECGKAFKGSSNLVLHQRIHSRGKPYLCNKCGKAFSQSTDLIIHHRIHTGEKPYECYDCGQMFSQSSHLVPHQRIHTGEKPLKCNECEKAFRQHSHLTEHQRLHSGEKPYECHRCGKTFSGRTAFLKHQRLHAGEKIEECEKTFSKDEELREEQRIHQEEKAYWCNQCGRNFQGTSDLIRHQVTHTGEKPYECKECGKTFNQSSDLLRHHRIHSGEKPCVCSKCGKSFRGSSDLIRHHRVHTGEKPYECSECGKAFSQRSHLVTHQKIHTGEKPYQCTECGKAFRRRSLLIQHRRIHSGEKPYECKECGKLFIWRTAFLKHQSLHTGEKLECEKTFSQDEELRGEQKIHQEAKAYWCNQCGRAFQGSSDLIRHQVTHTREKPYECKECGKTFNQSSDLLRHHRIHSGEKPYVCNKCGKSFRGSSDLIKHHRIHTGEKPYECSECGKAFSQRSHLATHQKIHTGEKPYQCSECGNAFRRRSLLIQHRRLHSGEKPYECKECGKLFMWHTAFLKHQRLHAGEKLEECEKTFSKDEELRKEQRTHQEKKVYWCNQCSRTFQGSSDLIRHQVTHTREKPYECKECGKTQSELRPSETS

SEQ ID NO: 16284 - protein, 648 aa, Homo sapiens
MELVTFRDVAIEFSPEEWKCLDPAQQNLYRDVMLENYRNLVSLGFVISNPDLVTCLEQIKEPCNLKIHETAAKPPAICSPFSQDLSPVQGIEDSFHKLILKRYEKCGHENLQLRKGCKRVNECKVQKGVNNGVYQCLSTTQSKIFQCNTCVKVFSKFSNSNKHKIRHTGEKPFKCTECGRSFYMSHLTQHTGIHAGEKPYKCEKCGKAFNRSTSLSKHKRIHTGEKPYTCEECGKAFRRSTVLNEHKKIHTGEKPYKCEECGKAFTRSTTLNEHKKIHTGEKPYKCKECGKAFRWSTSLNEHKNIHTGEKPYKCKECGKAFRQSRSLNEHKNIHTGEKPYTCEKCGKAFNQSSSLIIHRSIHSEQKLYKCEECGKAFTWSSSLNKHKRIHTGEKPYTCEECGKAFYRSSHLAKHKRIHTGEKPYTCEECGKAFNQSSTLILHKRIHSGQKPYKCEECGKAFTRSTTLNEHKKIHTGEKPYKCEECGKAFIWSASLNEHKNIHTGEKPYKCKECGKAFNQSSGLIIHRSIHSEQKLYKCEECGKAFTRSTALNEHKKIHSGEKPYKCKECGKAYNLSSTLTKHKRIHTGEKPFTCEECGKAFNWSSSLTKHKIIHTGEKSYKCEECGKAFNRPSTLTVHKRIHTGKEHS

SEQ ID NO: 16285 - protein, 504 aa, Homo sapiens
MPSPDSMTFEDIIVDFTQEEWALLDTSQRKLFQDVMLENISHLVSIGKQLCKSVVLSQLEQVEKLSTQRISLLQGREVGIKHQEIPFIQHIYQKGTSTISTMRSHTQEDPFLCNDLGEDFTQHIALTQNVITYMRTKHFVSKKFGKIFSDWLSFNQHKEIHTKCKSYGSHLFDYAFIQNSALRPHSVTHTREITLECRVCGKTFSKNSNLRRHEMIHTGEKPHGCHLCGKAFTHCSDLRKHERTHTGEKPYGCHLCGKAFSKSSNLRRHEMIHTREKAQICHLCGKAFTHCSDLRKHERTHLGDKPYGCLLCGKAFSKCSYLRQHERTHNGEKPYECHLCGKAFSHCSHLRQHERSHNGEKPHGCHLCGKAFTESSVLKRHERIHTGEKPYECHVCGKAFTESSDLRRHERTHTGEKPYECHLCGKAFNHSSVLRRHERTHTGEKPYECNICGKAFNRSYNFRLHRRVHTGEKPYVCPLCGKAFSKFFNLRQHERTHTKKAMNM

SEQ ID NO: 16286 - protein, 424 aa, Homo sapiens
MASMPPTPEAQGPILFEDLAVYFSQEECVTLHPAQRSLSKDGTKESLEDAALMGEEGKPEINQQLSLESMELDELALEKYPIAAPLVPYPEKSSEDGVGNPEAKILSGTPTYKRRVISLLVTIENHTPLVELSEYLGTNTLSEILDSPWEGAKNVYKCPECDQNFSDHSYLVLHQKIHSGEKKHKCGDCGKIFNHRANLRTHRRIHTGEKPYKCAKCSASFRQHSHLSRHMNSHVKEKPYTCSICGRGFMWLPGLAQHQKSHSAENTYESTNCDKHFNEKPNLALPEETFVSGPQYQHTKCMKSFRQSLYPALSEKSHDEDSERCSDDGDNFFSFSKFKPLQCPDCDMTFPCFSELISHQNIHTEERPHKCKTCEESFALDSELACHQKSHMLAEPFKCTVCGKTFKSNLHLITHKRTHIKNTT

SEQ ID NO: 16287 - protein, 904 aa, Homo sapiens
MAAAGGAEGRRAALEAAAAAAPERGGGSCVLCCGDLEATALGRCDHPVCYRCSTKMRVLCEQRYCAVCREELRQVVFGKKLPAFATIPIHQLQHEKKYDIYFADGKVYALYRQLLQHECPRCPELPPFSLFGDLEQHMRRQHELFCCRLCLQHLQIFTYERKWYSRKDLARHRMQGDPDDTSHRGHPLCKFCDERYLDNDELLKHLRRDHYFCHFCDSDGAQDYYSDYAYLREHFREKHFLCEEGRCSTEQFTHAFRTEIDLKAHRTACHSRSRAEARQNRHIDLQFSYAPRHSRRNEGVVGGEDYEEVDRYSRQGRVARAGTRGAQQSRRGSWRYKREEEDREVAAAVRASVAAQQQEEARRSEDQEEGGRPKKEEAAARGPEDPRGPRRSPRTQGEGPGPKETSTNGPVSQEAFSVTGPAAPGCVGVPGALPPPSPKLKDEDFPSLSASTSSSCSTAATPGPVGLALPYAIPARGRSAFQEEDFPALVSSVPKPGTAPTSLVSAWNSSSSSKKVAQPPLSAQATGSGQPTRKAGKGSRGGRKGGPPFTQEEEEDGGPALQELLSTRPTGSVSSTLGLASIQPSKVGKKKKVGSEKPGTTLPQPPPATCPPGALQAPEAPASRAEGPVAVVVNGHTEGPAPARSAPKEPPGLPRPLGSFPCPTPQEDFPALGGPCPPRMPPPPGFSAVVLLKGTPPPPPPGLVPPISKPPPGFSGLLPSPHPACVPSPATTTTTKAPRLLPAPRAYLVPENFRERNLQLIQSIRDFLQSDEARFSEFKSHSGEFRQGLISAAQYYKSCRDLLGENFQKVFNELLVLLPDTAKQQELLSAHTDFCNREKPLSTKSKKNKKSAWQATTQQAGLDCRVCPTCQQVLAHGDASSHQALHAARDDDFPSLQAIARIIT

SEQ ID NO: 16288 - protein, 588 aa, Homo sapiens
MAAPALALVSFEDVVVTFTGEEWGHLDLAQRTLYQEVMLETCRLLVSLGHPVPKPELIYLLEHGQELWTVKRGLSQSTCAGEKAKPKITEPTASQLAFSEESSFQELLAQRSSRDSRLGQARDEEKLIKIQEGNLRPGTNPHKEICPEKLSYKHDDLEPDDSLGLRVLQERVTPQDALHECDSQGPGKDPMTDARNNPYTCTECGKGFSKKWALVRHQQIHAGVKPYECNECGKACRYMADVIRHMRLHTGEKPYKCIECGKAFKRRFHLTEHQRIHTGDKPYECKECGKAFTHRSSFIQHNMTHTREKPFLCKECGKAFYYSSSFAQHMRIHTGKKLYECGECGKAFTHRSTFIQHNVTHTGEKPFLCKECGKTFCLNSSFTQHMRIHTGEKPYECGECGKAFTHRSTFIRHKRTHTGEKPFECKECGKAFCDSSSLIQHMRIHTGEKPYECSECGKAFTHHSVFIRHNRTHSGQKPLECKECAKAFYYSSSFTRHMRIHTGEKPYVCRECGKAFTQPANFVRHNRIHTGEKPFECKECEKAFCDNFALTQHMRTHTGEKPFECNECGKTFSHSSSFTHHRKIHTRV

SEQ ID NO: 16289 - protein, 722 aa, Homo sapiens
MMKEVLSTGQGNTEVIHTGTLQRYQSYHIGDFCFQEIEKEIHDIEFQCQEDERNGHEAPMTKIKKLTGSTDQHDHRHAGNKPIKDQLGSSFYSHLPELHIIQIKGKIGNQFEKSTSDAPSVSTSQRISPRPQIHISNNYGNNSPNSSLLPQKQEVYMREKSFQCNESGKAFNCSSLLRKHQIPHLGDKQYKCDVCGKLFNHKQYLTCHCRCHTGEKPYKCNECGKSFSQVSSLTCHRRLHTAVKSHKCNECGKIFGQNSALVIHKAIHTGEKPYKCNECDKAFNQQSNLARHRRIHTGEKPYKCEECDKVFSRKSTLESHKRIHTGEKPYKCKVCDTAFTWNSQLARHKRIHTGEKTYKCNECGKTFSHKSSLVCHHRLHGGEKSYKCKVCDKAFAWNSHLVRHTRIHSGGKPYKCNECGKTFGQNSDLLIHKSIHTGEQPYKYEECEKVFSCGSTLETHKIIHTGEKPYKCKVCDKAFACHSYLAKHTRIHSGEKPYKCNECSKTFRLRSYLASHRRVHSGEKPYKCNECSKTFSQRSYLHCHRRLHSGEKPYKCNECGKTFSHKPSLVHHRRLHTGEKSYKCTVCDKAFVRNSYLARHTRIHTAEKPYKCNECGKAFNQQSQLSLHHRIHAGEKLYKCETCDKVFSRKSHLKRHRRIHPGKKPYKCKVCDKTFGSDSHLKQHTGLHTGEKPYKCNECGKAFSKQSTLIHHQAVHGVGKLD

SEQ ID NO: 16290 - protein, 641 aa, Homo sapiens
MIQSQISFEDVAVDFTLEEWQLLNPTQKNLYRDVMLENYSNLVFLEVWLDNPKMWLRDNQDNLKSMERGHKYDVFGKIFNSSINIVHVGLRSHKCGTGEKSLKCPFDLLIPKNNCERKKIDELNKKLLFCIKPGRTHGGIKYCDCSTCRKSSNEEPWLTANHITHTGVYLCMECGRFFNKKSQLVIHQRTHTGEKPYQCSECGKAFSQKSLLTVHQRTHSGEKPHGCSECQKAFSRKSLLILHQRIHTGEKPYGCSECGKAFSRKSQLKRHQITHTIEKPYSCSECGKAFSQKLKLITHQRAHTGEKPYPCSHCGKAFFWKSQLITHQRTHTGKKPYGCGECQKAFSRNSLLIRHQRIHTGEKPYECNECGEAFIRKPQLIKHQITHTGEKNYRCSDCEEAFFKKSELIRHQKIHLGEKPYGCIQCGKTFFGKSQLLTHHRTHTGEKPYECSECGKAFTQKSSLISHQRTHTGEKPYECSECRKTFSEKSSLIHHQRTHTGEKPFECSECRKAFAWKPQLLRHQRIHTGEKPYECSECGKAFVQKVQLIKHQRNHTGEKTYGCSDCAKAFFEKAQLIIHQRIHTGERPYKCGECGKSFTRKSHLMRHQRIHTGDKYYGCNECGTTFNRKSQLMIHQRNHII

SEQ ID NO: 16291 - protein, 792 aa, Homo sapiens
MAAINPWASWGALTDQSWGMTAVDPWASWALCPQYPAWHVEGSLEEGRRATGLPAAQVQEPVTFKDVAVDFTQEEWGQLDLVQRTLYRDVMLETYGHLLSVGNQIAKPEVISLLEQGEEPWSVEQACPQRTCPEWVRNLESKALIPAQSIFEEEQSHGMKLERYIWDDPWFSRLEVLGCKDQLEMYHMNQSTAMRQMVFMQKQVLSQRSSEFCGLGAEFSQNLNFVPSQRVSQIEHFYKPDTHAQSWRCDSAIMYADKVTCENNDYDKTVYQSIQPIYPARIQTGDNLFKCTDAVKSFNHIIHFGDHKGIHTGEKLYEYKECHQIFNQSPSFNEHPRLHVGENQYNYKEYENIFYFSSFMEHQKIGTVEKAYKYNEWEKVFGYDSFLTQHTSTYTAEKPYDYNECGTSFIWSSYLIQHKKTHTGEKPYECDKCGKVFRNRSALTKHERTHTGIKPYECNKCGKAFSWNSHLIVHKRIHTGEKPYVCNECGKSFNWNSHLIGHQRTHTGEKPFECTECGKSFSWSSHLIAHMRMHTGEKPFKCDECEKAFRDYSALSKHERTHSGAKPYKCTECGKSFSWSSHLIAHQRTHTGEKPYNCQECGKAFRERSALTKHEIIHSGIKPYECNKCGKSCSQMAHLVRHQRTHTGEKPYECNKCGKSFSQSCHLVAHRRIHTGEKPYKCNQCERSFNCSSHLIAHRRTHTGEKPYRCNECGKAFNESSSLIVHLRNHTGEKPYKCNHCEKAFCKNSSLIIHQRMHSGEKRFICSECGKAFSGHSALLQHQRNHSEEKLN

SEQ ID NO: 16292 - protein, 696 aa, Homo sapiens
MSYGSITFGDVAIDFSHQEWEYLSLVQKTLYQEVMMENYDNLVSLAGHSVSKPDLITLLEQGKEPWMIVREETRGECTDLDSRCEIISDGKMQLYRKHSCVTLHQRIHNGQKPYECKQCQKSFSHLTELMVHQTIHTSEEPDQCEKFRKAFSHLTDLRKHQKINAREKPYECEECGKVFSYPANLAQHGKVHVEKPYECKECGEAFRTSRQLTVHHRFHYGEKPYECKECGKAFSVYGRLSRHQSIHTGEKPFECNKCGKSFRLKAGLKVHQSIHTGEKPHECKECGKAFRQFSHLVGHKRIHTGEKPYECKECGKGFTCRYQLTMHQRIYSGEKHYECKENGEAFSSGHQLTAPHTFESVEKPYKCEECGKAFSVHGRLTRHQGIHSGKKPYECNKCGKSFRLNSSLKIHQNIHTGEKPYKCKECGKAFSQRAHLAHHNRIHTGYKPFECKECGKSFRCASYLVIHERIHTGEKPYVCQECGKGFSYSHKLTIHRRVHTGEKPYECKECGKAFSVSGQLTQHLSIHSGKKPFECNKCGKSFRFISVLKAHQNIHSAEKPYECKECGKAFRHATSLIYHDRTHAGEKSYECKECGETFSHASHLIIHERIHTSDKPYECKRCGKAFHCASYLVRHESVHADGNPYMCEECGKAFNSSHELSIHHRVHTGEKPFKCNKCRRSFRLRSILEVHQRIHI

SEQ ID NO: 16293 - protein, 1512 aa, Homo sapiens
MSVNISTAGKGVDPNTVDTYDSGDDWEIGVGNLIIDLDADLEKDRQKFEMNNSTTTTSSSNSKDCGGPASSGAGATAALADGLKFASVQASAPQGNSHKETSKSKVKRSKTSKDANKSLPSAALYGIPEISSTGKRQEVQGRPGEATGMNSALGQSVSSGGSGNPNSNSTSTSTSAATAGAGSCGKSKEEKPGKSQSSRGAKRDKDAGKSRKDKHDLLQGHQNGSGSQAPSGGHLYGFGAKSNGGGASPFHCGGTGSGSVAAAGEVSKSAPDSGLMGNSMLVKKEEEEEESHRRIKKLKTEKVDPLFTVPAPPPPISSSLTPQILPSYFSPSSSNIAAPVEQLLVRTRSVGVNTCEVGVVTEPECLGPCEPGTSVNLEGIVWHETEEGVLVVNVTWRNKTYVGTLLDCTKHDWAPPRFCESPTSDLEMRGGRGRGKRARSAAAAPGSEASFTESRGLQNKNRGGANGKGRRGSLNASGRRTPPNCAAEDIKASPSSTNKRKNKPPMELDLNSSSEDNKPGKRVRTNSRSTPTTPQGKPETTFLDQGCSSPVLIDCPHPNCNKKYKHINGLRYHQAHAHLDPENKLEFEPDSEDKISDCEEGLSNVALECSEPSTSVSAYDQLKAPASPGAGNPPGTPKGKRELMSNGPGSIIGAKAGKNSGKKKGLNNELNNLPVISNMTAALDSCSAADGSLAAEMPKLEAEGLIDKKNLGDKEKGKKATNCKTDKNLSKLKSARPIAPAPAPTPPQLIAIPTATFTTTTTGTIPGLPSLTTTVVQATPKSPPLKPIQPKPTIMGEPITVNPALVSLKDKKKKEKRKLKDKEGKETGSPKMDAKLGKLEDSKGASKDLPGHFLKDHLNKNEGLANGLSESQESRMASIKAEADKVYTFTDNAPSPSIGSASRLECSTLVNGQAPMAPLHVLTQNGAESSAAKTSSPAYSDISDAADDGGSDSRSEGMRSKASSPSDIISSKDSVVKGHSSTTAQSSQLKESHSPYYHSYDPYYSPSYMHPGQVGAPAAGNSGSTQGMKIKKESEEDAEKKDKAEQLDSKKVDHNSASLQPQHQSVITQRHPALAQSLYYGQYAYGLYMDQKSLMATSPAYRQQYEKYYEDQRLAEQKMAQTGRGDCERKSELPLKELGKEETKQKNMPSATISKAPSTPEPNKNHSKLGPSVPNKTEETGKSQLLSNHQQQLQADSFKAKQMENHQLIKEAVEMKSVMDSMKQTGVDPTSRFKQDPDSRTWHHYVYQPKYLDQQKSEELDREKKLKEDSPRKTPNKESGVPSLPVSLTSIKEEPKEAKHPDSQSMEESKLKNDDRKTPVNWKDSRGTRVAVSSPMSQHQSYIQYLHAYPYPQMYDPSHPAYRAVSPVLMHSYPGAYLSPGFHYPVYGKMSGREETEKVNTSPSVNTKTTTESKALDLLQQHANQYRSKSPAPVEKATAEREREAERERDRHSPFGQRHLHTHHHTHVGMGYPLIPGQYDPFQGLTSAALVASQQVAAQASASGMFPGQRRE

SEQ ID NO: 16294 - protein, 1411 aa, Homo sapiens
MSLSSGASGGKGVDANPVETYDSGDEWDIGVGNLIIDLDADLEKDQQKLEMSGSKEVGIPAPNAVATLPDNIKFVTPVPGPQGKEGKSKSKRSKSGKDTSKPTPGTSLFTPSEGAASKKEVQGRSGDGANAGGLVAAIAPKGSEKAAKASRSVAGSKKEKENSSSKSKKERSEGVGTCSEKDPGVLQPVPLGGRGGQYDGSAGVDTGAVEPLGSIAIEPGAALNPLGTKPEPEEGENECRLLKKVKSEKMESPVSTPAVLPIHLLVPVVNNDISSPCEQIMVRTRSVGVNTCDVALATEPECLGPCEPGTSVNLEGIVWQETEDGMLVVNVTWRNKTYVGTLLDCTRHDWAPPRFCDSPTSDLEMRNGRGRGKRMRPNSNTPVNETATASDSKGTSNSSKTRAGANSKGRRGSQNSSEHRPPASSTSEDVKASPSSANKRKNKPLSDMELNSSSEDSKGSKRVRTNSMGSATGPLPGTKVEPTVLDRNCPSPVLIDCPHPNCNKKYKHINGLKYHQAHAHTDDDSKPEADGDSEYGEEPILHADLGSCNGASVSQKGSLSPARSATPKVRLVEPHSPSPSSKFSTKGLCKKKLSGEGDTDLGALSNDGSDDGPSVMDETSNDAFDSLERKCMEKEKCKKPSSLKPEKIPSKSLKSARPIAPAIPPQQIYTFQTATFTAASPGSSSGLTATVAQAMPNSPQLKPIQPKPTVMGEPFTVNPALTPAKDKKKKDKKKKESSKELESPLTPGKVCRAEEGKSPFRESSGDGMKMEGLLNGSSDPHQSRLASIKAEADKIYSFTDNAPSPSIGGSSRLENTTPTQPLTPLHVVTQNGAEASSVKTNSPAYSDISDAGEDGEGKVDSVKSKDAEQLVKEGAKKTLFPPQPQSKDSPYYQGFESYYSPSYAQSSPGALNPSSQAGVESQALKTKRDEEPESIEGKVKNDICEEKKPELSSSSQQPSVIQQRPNMYMQSLYYNQYAYVPPYGYSDQSYHTHLLSTNTAYRQQYEEQQKRQSLEQQQRGVDKKAEMGLKEREAALKEEWKQKPSIPPTLTKAPSLTDLVKSGPGKAKEPGADPAKSVIIPKLDDSSKLPGQAPEGLKVKLSDASHLSKEASEAKTGAECGRQAEMDPILWYRQEAEPRMWTYVYPAKYSDIKSEDERWKEERDRKLKEERSRSKDSVPKEDGKESTSSDCKLPTSEESRLGSKEPRPSVHVPVSSPLTQHQSYIPYMHGYSYSQSYDPNHPSYRSMPAVMMQNYPGSYLPSSYSFSPYGSKVSGGEDADKARASPSVTCKSSSESKALDILQQHASHYKSKSPTISDKTSQERDRGGCGVVGGGGSCSSVGGASGGERSVDRPRTSPSQRLMSTHHHHHHLGYSLLPAQYNLPYAAGLSSTAIVASQQGSTPSLYPPPRR

SEQ ID NO: 16295 - protein, 462 aa, Homo sapiens
MLCDEEAQKRKAKESGMALPQGRLTFMDVAIEFSQEEWKSLDPGQRALYRDVMLENYRNLVFLGICLPDLSIISMLKQRREPLILQSQVKIVKNTDGRECVRSVNTGRSCVLGSNAENKPIKNQLGLTLEAHLSELQLFQAGRKIYRSNQVEKFTNHRSSVSPLQKISSSFTTHIFNKYRNDLIDFPLLPQEEKAYIRGKSYEYECSEDGEVFRVRASLTNHQVIHTAEKPYKCTECGKVFSRNSHLVEHWRIHTGQKPYKCSECDKVFNRNSNLARHQRIHTGEKPHKCNECGKAFRECSGLTTHLVIHTGEKPYKCNECGKNFRHKFSLTNHQRSHTAEKPYKCNECGKVFSLLSYLARHQIIHSTEKPYKCNECGRAFHKRPGLMAHLLIHTGEKPYKCNECDKVFGRKLYLTNHQRIHTGERPYKCNACGKVFNQNPHLSRHRKIHAGENSLRTLQME

SEQ ID NO: 16296 - protein, 705 aa, Homo sapiens
MLREEAAQKRKGKEPGMALPQGRLTFRDVAIEFSLAEWKCLNPSQRALYREVMLENYRNLEAVDISSKCMMKEVLSTGQGNTEVIHTGTLQRHESHHIGDFCFQEIEKEIHDIEFQCQEDERNGLEAPMTKIKKLTGSTDQHDHRHAGNKPIKDQLGSSFYSHLPELHIFQIKGEIGNQLEKSTNDAPSVSTFQRISCRPQTQISNNYGNNPLNSSLLPQKQEVHMREKSFQCNKSGKAFNCSSLLRKHQIPHLGDKQYKCDVCGKLFNHEQYLACHDRCHTVEKPYKCKECGKTFSQESSLTCHRRLHTGVKRYNCNECGKIFGQNSALLIDKAIDTGENPYKCNECDKAFNQQSQLSHHRIHTGEKPYKCEECDKVFSRKSTIETHKRIHTGEKPYRCKVCDTAFTWHSQLARHRRIHTAKKTYKCNECGKTFSHKSSLVCHHRLHGGEKSYKCKVCDKAFVWSSQLAKHTRIDCGEKPYKCNECGKTFGQNSDLLIHKSIHTGEQPYKCDECEKVFSRKSSLETHKIGHTGEKPYKCKVCDKAFACHSYLAKHTRIHSGEKPYKCNECSKTFSHRSYLVCHHRVHSGEKPYKCNECSKTFSRRSSLHCHRRLHSGEKPYKCNECGNTFRHCSSLIYHRRLHTGEKSYKCTICDKAFVRNSLLSRHTRIHTAEKPYKCNECGKAFNQQSHLSRHHRIHTGEKP

SEQ ID NO: 16297 - protein, 617 aa, Homo sapiens
MIKSQESLTLEDVAVEFTWEEWQLLGPAQKDLYRDVMLENYSNLVSVGYQASKPDALFKLEQGEPWTVENEIHSQICPEIKKVDNHLQMHSQKQRCLKRVEQCHKHNAFGNIIHQRKSDFPLRQNHDTFDLHGKILKSNLSLVNQNKRYEIKNSVGVNGDGKSFLHAKHEQFHNEMNFPEGGNSVNTNSQFIKHQRTQNIDKPHVCTECGKAFLKKSRLIYHQRVHTGEKPHGCSICGKAFSRKSGLTEHQRNHTGEKPYECTECDKAFRWKSQLNAHQKIHTGEKSYICSDCGKGFIKKSRLINHQRVHTGEKPHGCSLCGKAFSKRSRLTEHQRTHTGEKPYECTECDKAFRWKSQLNAHQKAHTGEKSYICRDCGKGFIQKGNLIVHQRIHTGEKPYICNECGKGFIQKGNLLIHRRTHTGEKPYVCNECGKGFSQKTCLISHQRFHTGKTPFVCTECGKSCSHKSGLINHQRIHTGEKPYTCSDCGKAFRDKSCLNRHRRTHTGERPYGCSDCGKAFSHLSCLVYHKGMLHAREKCVGSVKLENPCSESHSLSHTRDLIQDKDSVNMVTLQMPSVAAQTSLTNSAFQAESKVAIVSQPVARSSVSADSRICTE

SEQ ID NO: 16298 - protein, 585 aa, Homo sapiens
MIKTQESLTLEDVAVEFSWEEWQLLDTAQKNLYRDVMVENYNHLVSLGYQTSKPDVLSKLAHGQEPWTTDAKIQNKNCPGIGKVDSHLQEHSPNQRLLKSVQQCNGQNTLRNIVHLSKTHFPIVQNHDTFDLYRKNLKSSLSLINQKRRHGINNPVEFIGGEKTLLHGKHERTHTKTRFSENAKCIHTKFQVFKHQRTQKIEKPHACIECEQTFLRKSQLIYHENICIQENPGSGQCEKLSRSVLFTKHLKTNTTDKICIPNEYRKGSTVKSSLITHQQTHTEEKSYMCSECGKGFTMKRYLIAHQRTHSGEKPYVCKECGKGFTVKSNLIVHQRTHTGEKPYICSECGKGFTMKRYLVVHQRTHTGEKPYMCSECGKGFTVKSNLIVHQRSHTGEKSYICSECGKGFTVKRTLVIHQRTHTGEKSYICNECGKGFTTKRTLIIHQRTHTGEKPYECNECGKAFSQKICLIQHERCHTGKTPFVCTECGKSYSHKYGLITHQRIHTGEKPYECNECGKAFTTKSVLNVHQRTHTGERPYGCSDCEKAFSHLSNLVKHKKMHTREMGRISQVENSCNGESQLLPYK

SEQ ID NO: 16299 - protein, 731 aa, Homo sapiens
MMQAQESLTLEDVAVDFTWEEWQFLSPAQKDLYRDVMLENYSNLVAVGYQASKPDALSKLERGEETCTTEDEIYSRICSEIRKIDDPLQHHLQNQSIQKSVKQCHEQNMFGNIVNQNKGHFLLKQDCDTFDLHEKPLKSNLSFENQKRSSGLKNSAEFNRDGKSLFHANHKQFYTEMKFPAIAKPINKSQFIKQQRTHNIENAHVCSECGKAFLKLSQFIDHQRVHTGEKPHVCSMCGKAFSRKSRLMDHQRTHTELKHYECTECDKTFLKKSQLNIHQKTHMGGKPYTCSQCGKAFIKKCRLIYHQRTHTGEKPHGCSVCGKAFSTKFSLTTHQKTHTGEKPYICSECGKGFIEKRRLTAHHRTHTGEKPFICNKCGKGFTLKNSLITHQQTHTGEKLYTCSECGKGFSMKHCLMVHQRTHTGEKPYKCNECGKGFALKSPLIRHQRTHTGEKPYVCTECRKGFTMKSDLIVHQRTHTAEKPYICNDCGKGFTVKSRLIVHQRTHTGEKPYVCGECGKGFPAKIRLMGHQRTHTGEKPYICNECGKGFTEKSHLNVHRRTHTGEKPYVCSECGKGLTGKSMLIAHQRTHTGEKPYICNECGKGFTMKSTLSIHQQTHTGEKPYKCNECDKTFRKKTCLIQHQRFHTGKTSFACTECGKFSLRKNDLITHQRIHTGEKPYKCSDCGKAFTTKSGLNVHQRKHTGERPYGCSDCGKAFAHLSILVKHRRIHR

SEQ ID NO: 16300 - protein, 781 aa, Homo sapiens
MATQGHLTFKDVAIEFSQEEWKCLEPVQKALYKDVMLENYRNLVFLGISPKCVIKELPPTENSNTGERFQTVALERHQSYDIENLYFREIQKHLHDLEFQWKDGETNDKEVPVPHENNLTGKRDQHSQGDVENNHIENQLTSNFESRLAELQKVQTEGRLYECNETEKTGNNGCLVSPHIREKTYVCNECGKAFKASSSLINHQRIHTTEKPYKCNECGKAFHRASLLTVHKVVHTRGKSYQCDVCGKIFRKNSYFVRHQRSHTGQKPYICNECGKSFSKSSHLAVHQRIHTGEKPYKCNLCGKSFSQRVHLRLHQTVHTGERPFKCNECGKTFKRSSNLTVHQVIHAGKKPYKCDVCGKAFRHRSNLVCHRRIHSGEKQYKCNECGKVFSKRSSLAVHRRIHTVEKPCKCNECGKVFSKRSSLAVHQRIHTGQKTYKCNKCGKVYSKHSHLAVHWRIHTGEKAYKCNECGKVFSIHSRLAAHQRIHTGEKPYKCNECGKVFSQHSRLAVHRRIHTGEKPYKCKECGKVFSDRSAFARHRRIHTGEKPYKCKECGKVFSQCSRLTVHRRIHSGEKPYKCNECGKVYSQYSHLVGHRRVHTGEKPYKCHECGKAFNQGSTLNRHQRIHTGEKPYKCNQCGNSFSQRVHLRLHQTVHTGDRPYKCNECGKTFKRSSNLTAHQIIHAGKKPYKCDECGKVFRHSSHLVSHQRIHTGEKRYKCIECGKAFGRLFSLSKHQRIHSGKKPYKCNECGKSFICRSGLTKHRIRHTGESLTTKLNVTRP

SEQ ID NO: 16301 - protein, 954 aa, Homo sapiens
MNQPGGAAAPQADGASAAGRKSTASRERLKRSQKSTKVEGPEPVPAEASLSAEQGTMTEVKVKTELPDDYIQEVIWQGEAKEEKKAVSKDGTSDVPAEICVVIGGVRNQQTLDGKAPEGSPHGGSVRSRYSGTWIFDQALRYASGSYECGICGKKYKYYNCFQTHVRAHRDTEATSGEGASQSNNFRYTCDICGKKYKYYSCFQEHRDLHAVDVFSVEGAPENRADPFDQGVVATDEVKEEPPEPFQKIGPKTGNYTCEFCGKQYKYYTPYQEHVALHAPISTAPGWEPPDDPDTGSECSHPEVSPSPRFVAAKTQTNQSGKKAPASVVRCATLLHRTPPATQTQTFRTPNSGSPASKATAAESAFSRRVEGKAQNHFEETNSSSQNSSEPYTCGACGIQFQFYNNLLEHMQSHAADNENNIASNQSRSPPAVVEEKWKPQAQRNSANNTTTSGLTPNSMIPEKERQNIAERLLRVMCADLGALSVVSGKEFLKLAQTLVDSGARYGAFSVTEILGNFNTLALKHLPRMYNQVKVKVTCALGSNACLGIGVTCHSQSVGPDSCYILTAYQAEGNHIKSYVLGVKGADIRDSGDLVHHWVQNVLSEFVMSEIRTVYVTDCRVSTSAFSKAGMCLRCSACALNSVVQSVLSKRTLQARSMHEVIELLNVCEDLAGSTGLAKETFGSLEETSPPPCWNSVTDSLLLVHERYEQICEFYSRAKKMNLIQSLNKHLLSNLAAILTPVKQAVIELSNESQPTLQLVLPTYVRLEKLFTAKANDAGTVSKLCHLFLEALKENFKVHPAHKVAMILDPQQKLRPVPPYQHEEIIGKVCELINEVKESWAEEADFEPAAKKPRSAAVENPAAQEDDRLGKNEVYDYLQEPLFQATPDLFQYWSCVTQKHTKLAKLAFWLLAVPAVGARSGCVNMCEQALLIKRRRLLSPEDMNKLMFLKSNML

SEQ ID NO: 16302 - protein, 560 aa, Homo sapiens
MGQPAPYAEGPIQGGDAGELCKCDFLVSISIPQTRSDIPAGARRSSMGPRSLDTCWGRGPERHVHRLECNGVIFTHRNLCLPGGKTKTENEEKTAQLNISKESESHRLIVEGLLMDVPQHPDFKDRLEKSQLHDTGNKTKIGDCTDLTVQDHESSTTEREEIARKLEESSVSTHLITKQGFAKEQVFYKCGECGSYYNPHSDFHLHQRVHTNEKPYTCKECGKTFRYNSKLSRHQKIHTGEKPYSCEECGQAFSQNSHLLQHQKLHGGQRPYECTDCGKTFSYNSKLIRHQRIHTGEKPFKCKECGKAFSCSYDCIIHERIHNGEKPYECKECGKSLSSNSVLIQHQRIHTGEKPYECKECGKAFHRSSVFLQHQRFHTGEQLYKCNECWKTFSCSSRFIVHQRIHNGEKPYECQECGKTFSQKITLVQHQRVHTGEKPYECKECGKAFRWNASFIQHQKWHTRKKLINGTGLSAVKPYCPCAILSPLPPQHTCSALAPPGPPLSSSHAVVLPPSVPFFLLLPSSEKANPSPVQIAHFFQDLAFPGKSSLQSPNPLSHSL

SEQ ID NO: 16303 - protein, 422 aa, Homo sapiens
MFQTAWRQEPVTFEDVAVYFTQNEWASLDSVQRALYREVMLENYANVASLAFPFTTPVLVSQLEQGELPWGLDPWEPMGREALRGICPGDEARTEKEGLTPKDHVSKETESFRLMVGGLPGNVSQHLDFGSSLEQPQGHWIIKTKSKRRHFTDTSARHHEAYEVKNGEKFEKLGKNISVSTQLTTNQTNPSGQISYECGQCGRYFIQMADFHRHEKCHTGEKSFECKECGKYFRYNSLLIRHQIIHTGKKPFKCKECGKGLSSDTALIQHQRIHTGEKPYECKECGKAFSSSSVFLQHQRFHTGEKLYECNECWKTFSCSSSFTVHQRMHTGEKPYECKECGKRLSSNTALTQHQRIHTGEKPFECKECGKAFNQKITLIQHQRVHTGEKPYECKVCGKTFSWCGRFILHQKLHTQKTPVQA

SEQ ID NO: 16304 - protein, 439 aa, Homo sapiens
MLQTTWPQESVTFEDVAVYFTQNQWASLDPAQRALYGEVMLENYANVASLVAFPFPKPALISHLERGEAPWGPDPWDTEILRGISQGGESWIKNEGLVIKQEASEETELHRMPVGGLLRNVSQHFDFKRKALKQTFNLNPNLILRGGMKFYECKECGKIFRYNSKLIRHQMSHTGEKPFKCKECGKAFKSSYDCIVHEKNHIGEGPYECKECGKGLSSNTALTQHQRIHTGEKPYECKECGKAFRRSAAYLQHQRLHTGEKLYKCKECWKAFGCRSLFIVHQRIHTGEKPYQCKECGKAFTQKIASIQHQRVHTGEKPYECKVCGKAFKWYGSFVQHQKLHPVEKKPVKVLGPSLVSPQCSSPAIPPVLLQGSCSASAVAVPSLTFPHAVLIPTSGNFFMLLPTSGIPSSSAQIVRVFQGLTPTVKPSPVILTPSSHSS

SEQ ID NO: 16305 - protein, 477 aa, Homo sapiens
MATYTCITCRVAFRDADMQRAHYKTDWHRYNLRRKVASMAPVTAEGFQERVRAQRAVAEEESKGSATYCTVCSKKFASFNAYENHLKSRRHVELEKKAVQAVNRKVEMMNEKNLEKGLGVDSVDKDAMNAAIQQAIKAQPSMSPKKAPPAPAKEARNVVAVGTGGRGTHDRDPSEKPPRLQWFEQQAKKLAKQQEEDSEEEEEDLDGDDWEDIDSDEELECEDTEAMDDVVEQDAEEEEAEEGPPLGAIPITDCLFCSHHSSSLMKNVAHMTKDHSFFIPDIEYLSDIKGLIKYLGEKVGVGKICLWCNEKGKSFYSTEAVQAHMNDKSHCKLFTDGDAALEFADFYDFRSSYPDHKEGEDPNKAEELPSEKNLEYDDETMELILPSGARVGHRSLMRYYKQRFGLSRAVAVAKNRKAVGRVLQQYRALGWTGSTGAALMRERDMQYVQRMKSKWMLKTGMKNNATKQMHFRVQVRF

SEQ ID NO: 16306 - protein, 536 aa, Homo sapiens
MILLSFVSDSNVGTGEKKVTEAWISEDENSHRTTSDRLTVMELPSPESEEVHEPRLGELLGNPEGQSLGSSPSQDRGCKQVTVTHWKIQTGETAQVCTKSGRNHILNSDLLLLQRELIEGEANPCNICGKTFTFNSDLVRHRISHAGEKPYTCDQCGKGFGQSSHLMEHQRIHTGERLYVCNVCGKDFIHYSGLIEHQRVHSGEKPFKCAQCGKAFCHSSDLIRHQRVHTRERPFECKECGKGFSQSSLLIRHQRIHTGERPYECNECGKSFIRSSSLIRHYQIHTEVKQYECKECGKAFRHRSDLIEHQRIHTGERPFECNECGKAFIRSSKLIQHQRIHTGERPYVCNECGKRFSQTSNFTQHQRIHTGEKLYECNECGKAFFLSSYLIRHQKIHTGERVYECKECGKAFLQKAHLTEHQKIHSGDRPFECKDCGKAFIQSSKLLLHQIIHTGEKPYVCSYCGKGFIQRSNFLQHQKIHTEEKLYECSQYGRDFNSTTNVKNNQRVHQEGLSLSKAPIHLGERSVDKGEHTGNL

SEQ ID NO: 16307 - protein, 865 aa, Homo sapiens
MSLQDSTLSREGKPEGEIMAAVFFSVGRLSPEVTQPDEDLHLQAEETQLVKESVTFKDVAIDFTLEEWRLMDPTQRNLHKDVMLENYRNLVSLGLAVSKPDMISHLENGKGPWVTVREISRIPYPDMEPKPATKKATRTKAISEDLSQEAILEKLTENGLWDSRMEGLWKWNDRILRLQNNQENHLSQRIIPLKKTPTSQRGFRFESILIPEPGIATEELHSRCQTQEENFTENLNLITDTHLGKIICKEMKGSKAIRQTSELTLGKKSNNKEKPYKCSTCEKAFHYRSLLIQHQRTHTKEKPYECNECGKTFSQPSYLSQHKKIHTGEKPYKCNECGKAFIASSSLMVHQRIHTKEKPYQCNVCGKSFSQCARLNQHQRIQTGEKPYKCSECGKAFSDKSKLARHQETHNGEKPYKCDDCGKAFRNKSYLSVHQKTHTEEKPYQCNECGKSFKNTTIFNVHQRIHTGEKPFRCNECGKAYRSNSSLIVHIRTHTGEKPYECNECGKAFNRIANFTEHQRIHTGEKPYKCNECGKAFINYSCLTVHHRMHTGEKPYKCTECGKAFMRSSSLIIHQRIHTEEKPYLCNECGESFRIKSHLTVHQRIHTGEKPYKCTDCERAFTKMVNLKEHQKIHTGVKPYKCYDCGKSFRTKSYLIVHQRTHTGEKPYKCNECEKAFTNTSQLTVHQRRHTGEKPYKCNECGKVFTSNSGFNTHQRTHTGEKPFKCNDCGKAFSQMVHVTEHQKIHSGEKPYKCDVCGKAFRRGSYLTVHWRTHTGEKPYTCKECGKGCITLSQLTLHQRIHTGERPYKCEECGKAFRTNSDFTVHLRMHTGEKPYKCNECGKAFRSSSSLTVHQRIHQRETQLI

SEQ ID NO: 16308 - protein, 306 aa, Homo sapiens
MGERLLESKKDHQHGEILTQVPDDMLKKKTPRVKSCGEVSVGHASLNRHHRADTGHKPYEYQEYGQKPYKCTYCKKAFSDLPYFRTHEWAHTGGKPYDCEECGKSFISRSSIRRHRIMHSGDGPYKCNFCGKALMCLSLYLIHKRTHTGEKPYECKQCGKAFSHSGSLRIHERTHTGEKPYECSECGKAFHSSTCLHAHKITHTGEKPYECKQCGKAFVSFNSVRYHERTHTGEKPYECKQCGKAFRSASHLRTHGRTHTGEKPYECKQCGKAFGCASSVKIHERTHTGEKPCSSNTSKGQGEKIA

SEQ ID NO: 16309 - protein, 528 aa, Homo sapiens
MGPLQFRDVAIEFSLEEWHCLDTAQRNLYRNVMLENYSNLVFLGITVSKPDLITCLEQGRKPLTMKRNEMIAKPSVMCSHFAQDLWPEQSMKDSFQKVVLRRYEKCEHDNLQLKKGCISVDECKVHKEGYNELNQCLTTTPRKICQCDKYVKVLHQFPNSNGQKRGHTGKKPFKYIECGKAFKQFSTLTTHKKIHTGGKPYKCEECGKAFNHSCSLTRHKKIHTGEKPYKCEECGKAFKHSSTLTTHKRNHTGEKPYKCDKCGKAFMSSSTLSKHEIIHTEKKPYKCEECGKAFNRSSTLTTHKIIHTGEKPYKCEECDKAFKYSYTLTTHKRIHTEDKPYKCEECGKAFKYSSTLTTHKRIHTGEKPYKCEECGKAFKRSSDLTTHKIIHTGEKPYKCEECGKAFKYSSNLTTHKKIHTGERPYKCEECGKAFNQSSILTTHRRIHTGEKFYKCEECGKAFKCSSNLTTHKKIHTGERPYKCEECGKAFNQSSILTTHERIILERNSTNVKNVAKPSSGPHTLLHIR

SEQ ID NO: 16310 - protein, 461 aa, Homo sapiens
MDSVAFEDVAVNFTLEEWALLDPSQKNLYRDVMRETFRNLASVGKQWEDQNIEDPFKIPRRNISHIPERLCESKEGGQGEETFSQIPDGILNKKTPGVKPCESSVCGEVGMGPSSLNRHIRDHTGREPNEYQEYGKKSYTRNQCGRALSYHRSFPVRERTHPGGKPYDCKECGETFISLVSIRRHMLTHRGGVPYKCKVCGKAFDYPSLFRIHERSHTGEKPYECKQCGKAFSCSSYIRIHERTHTGDKPYECKQCGKAFSCSKYIRIHERTHTGEKPYECKQCGKAFRCASSVRSHERTHTGEKLFECKECGKALTCLASVRRHMIKHTGNGPYKCKVCGKAFDFPSSFRIHERTHTGEKPYDCKQCGKAFSCSSSFRKHERIHTGEKPYKCTKCGKAFSRSSYFRIHERTHTGEKPYECKQCGKAFSRSTYFRVHEKIHTGEKPYENPNPNASVVPVLS

SEQ ID NO: 16311 - protein, 1059 aa, Homo sapiens
MSGVMVGSHADMAPASTAEGAGEKPGPAAPAPAAQYECGECGKSFRWSSRLLHHQRTHTGERPYKCPDCPKAFKGSSALLYHQRGHTGERPYQCPDCPKAFKRSSLLQIHRSVHTGLRAFICGQCGLAFKWSSHYQYHLRQHTGERPYPCPDCPKAFKNSSSLRRHRHVHTGERPYTCGVCGKSFTQSTNLRQHQRVHTGERPFRCPLCPKTFTHSSNLLLHQRTHGAAPAPGTASAAPPPQSREPGKVFVCDAYLQRHLQPHSPPAPPAPPPPPPPVVPELFLAAAETTVELVYRCDGCEQGFSSEELLLEHQPCPGPDAAPQPQEAPAEAPKADQPPSPLPQPPPPAAAPAPGFACLPCGKSFRTVAGLSRHQHSHGAAGGQAFRCGSCDGSFPQLASLLAHQQCHVEEAAAGRPPPQAEAAEVTCPQEPLAPAAPVPPPPPSAPASAERPYKCAECGKSFKGSSGLRYHLRDHTGERPYQCGECGKAFKRSSLLAIHQRVHTGLRAFTCGQCGLTFKWSSHYQYHLRLHSGERPYACGECGKAFRNTSCLRRHRHVHTGERPHACGVCGKSFAQTSNLRQHQRVHTGERPFRCPLCPKTFTHSSNLLLHQRTHSAERPFTCPICGRGFVMAAYLQRHLRTHAPANTPPSTTAPAAGPQPPAPLAAARAPPATQDVHVLPHLQATLSLEVAGGTAQAPSLGPAAPNSQTFLLVQTAQGLQLIPSSVQPPTPPPPPAPPKLILLPSSSAGAGGGRARQGPRAVGKAGQGAGVVWLPGPGGLGVQGAASAGASGTGQSLIVLQNVGGGEAGPQEMSGVQLQPLRPAPEVTTVQLQPAQEVTTVQLQPAQEVTTVQLQPAQEVTTVQLQPVAGQLSNSSGGAVATEAPNLLVVQSGAAEELLTGPGPGEAGDGEASTGVVQDVLFETLQTDEGLQSVLVLSGADGEQTRLCVQEVETLPPGLTEPPATGPPGQKLLIIRSAPATELLDSSNTGGGTATLQLLAPPPSGPASGPAGLPGAPASQMVQVVPAGAGPGVMTPQGLPSIQIVQTLPAVQLVHTF

SEQ ID NO: 16312 - protein, 869 aa, Homo sapiens
MEPETALWGPDLQGPEQSPNDAHRGAESENEEESPRQESSGEEIIMGDPAQSPESKDSTEMSLERSSQDPSVPQNPPTPLGHSNPLDHQIPLDPPAPEVVPTPSDWTKACEASWQWGALTTWNSPPVVPANEPSLRELVQGRPAGAEKPYICNECGKSFSQWSKLLRHQRIHTGERPNTCSECGKSFTQSSHLVQHQRTHTGEKPYKCPDCGKCFSWSSNLVQHQRTHTGEKPYKCTECEKAFTQSTNLIKHQRSHTGEKPYKCGECRRAFYRSSDLIQHQATHTGEKPYKCPECGKRFGQNHNLLKHQKIHAGEKPYRCTECGKSFIQSSELTQHQRTHTGEKPYECLECGKSFGHSSTLIKHQRTHLREDPFKCPVCGKTFTLSATLLRHQRTHTGERPYKCPECGKSFSVSSNLINHQRIHRGERPYICADCGKSFIMSSTLIRHQRIHTGEKPYKCSDCGKSFIRSSHLIQHRRTHTGEKPYKCPECGKSFSQSSNLITHVRTHMDENLFVCSDCGKAFLEAHELEQHRVIHERGKTPARRAQGDSLLGLGDPSLLTPPPGAKPHKCLVCGKGFNDEGIFMQHQRIHIGENPYKNADGLIAHAAPKPPQLRSPRLPFRGNSYPGAAEGRAEAPGQPLKPPEGQEGFSQRRGLLSSKTYICSHCGESFLDRSVLLQHQLTHGNEKPFLFPDYRIGLGEGAGPSPFLSGKPFKCPECKQSFGLSSELLLHQKVHAGGKSSQKSPELGKSSSVLLEHLRSPLGARPYRCSDCRASFLDRVALTRHQETHTQEKPPNPEDPPPEAVTLSTDQEGEGETPTPTESSSHGEGQNPKTLVEEKPYLCPECGAGFTEVAALLLHRSCHPGVSL

SEQ ID NO: 16313 - protein, 485 aa, Homo sapiens
MNEYPKKRKRKTLHPSRYSDSSGISRIADGFNGIFSDHCYSVCSMRQPDLKYFDNKDDDSDTETSNDLPKFADGIKARNRNQNYLVPSPVLRILDHTAFSTEKSADIVICDEECDSPESVNQQTQEESPIEVHTAEDVPIAVEVHAISEDYDIETENNSSESLQDQTDEEPPAKLCKILDKSQALNVTAQQKWPLLRANSSGLYKCELCEFNSKYFSDLKQHMILKHKRTDSNVCRVCKESFSTNMLLIEHAKLHEEDPYICKYCDYKTVIFENLSQHIADTHFSDHLYWCEQCDVQFSSSSELYLHFQEHSCDEQYLCQFCEHETNDPEDLHSHVVNEHACKLIELSDKYNNGEHGQYSLLSKITFDKCKNFFVCQVCGFRSRLHTNVNRHVAIEHTKIFPHVCDDCGKGFSSMLEYCKHLNSHLSEGIYLCQYCEYSTGQIEDLKIHLDFKHSADLPHKCSDCLMRFGNERELISHLPVHETT

SEQ ID NO: 16314 - protein, 438 aa, Homo sapiens
MQAEDRSQFGSAAEMLSEQTAALGTGWESMNVQLDGAEPQVERGSQEERPWRTVPGPLEHLCCDLEEEPQSLQEKAQSAPWVPAIPQEGNTGDWEMAAALLAAGSQGLVTIKDVSLCFSQEEWRSLDPSQTDFYGEYVMQENCGIVVSLRFPIPKLDMLSQLEGGEEQWVPDPQDLEERDILRVTYTGDGSEHEGDTPELEAEPPRMLSSVSEDTVLWNPEHDESWDSMPSSSRGMLLGPPFLQEDSFSNLLCSTEMDSLLRPHTCPQCGKQFVWGSHLARHQQTHTGERPYSCLKCEKTFGRRHHLIRHQKTHLHDKTSRCSECGKNFRCNSHLASHQRVHAEGKSCKGQEVGESPGTRKRQRAPPVPKCHVCTECGKSFGRRHHLVRHWLTHTGEKPFQCPRCEKSFGRKHHLDRHLLTHQGQSPRNSWDRGTSVF

SEQ ID NO: 16315 - protein, 1327 aa, Homo sapiens
MRSFLQQDVNKTKSRLNVLNGLANNMDDLKINTDITGAKEELLDDNNFISDKESGVHKPKDCQTSFQKNNTLTLPEELSKDKSENALSGGQSSLFIHAGAPTVSSENFILPKGAAVNGPVSHSSLTKTSNMNKGSVSLTTGQPVDQPTTESCSTLKVAADLQLSTPQKASQHQVLFLLSDVAHAKNPTHSNKKLPTSASVGCDIQNSVGSNIKSDGTLINQVEVGEDGEDLLVKDDCVNTVTGISSGTDGFRSENDTNWDPQKEFIQFLMTNEETVDKAPPHSKIGLEKKRKRKMDVSKITRYTEDCFSDSNCVPNKSKMQEVDFLEQNEELQAVDSQKYALSKVKPESTDEDLESVDAFQHLIYNPDKCGEESSPVHTSTFLSNTLKKKCEESDSESPATFSTEEPSFYPCTKCNVNFREKKHLHRHMMYHLDGNSHFRHLNVPRPYACRECGRTFRDRNSLLKHMIIHQERRQKLMEEIRELKELQDEGRSARLQCPQCVFGTNCPKTFVQHAKTHEKDKRYYCCEECNFMAVTENELECHRGIAHGAVVKCPMVTSDIAQRKTQKKTFMKDSVVGSSKKSATYICKMCPFTTSAKSVLKKHTEYLHSSSCVDSFGSPLGLDKRKNDILEEPVDSDSTKTLTKQQSTTFPKNSALKQDVKRTFGSTSQSSSFSKIHKRPHRIQKARKSIAQSGVNMCNQNSSPHKNVTIKSSVDQKPKYFHQAAKEKSNAKANSHYLYRHKYENYRMIKKSGESYPVHFKKEEASSLNSLHLFSSSSNSHNNFISDPHKPDAKRPESFKDHRRVAVKRVIKESKKESSVGGEDLDSYPDFLHKMTVVVLQKLNSAEKKDSYETEDESSWDNVELGDYTTQAIEDETYSDINQEHVNLFPLFKSKVEGQEPGENATLSYDQNDGFYFEYYEDTGSNNFLHEIHDPQHLETADASLSKHSSVFHWTDLSLEKKSCPYCPATFETGVGLSNHVRGHLHRAGLSYEARHVVSPEQIATSDKMQHFKRTGTGTPVKRVRKAIEKSETTSEHTCQLCGGWFDTKIGLSNHVRGHLKRLGKTKWDAHKSPICVLNEMMQNEEKYEKILKALNSRRIIPRPFVAQKLASSDDFISQNVIPLEAYRNGLKTEALSVSASEEEGLNFLNEYDETKPELPSGKKNQSLTLIELLKNKRMGEERNSAISPQKIHNQTARKRFVQKCVLPLNEDSPLMYQPQKMDLTMHSALDCKQKKSRSRSGSKKKMLTLPHGADEVYILRCRFCGLVFRGPLSVQEDWIKHLQRHIVNANLPRTGAGMVEVTSLLKKPASITETSFSLLMAEAAS

SEQ ID NO: 16316 - protein, 425 aa, Homo sapiens
MNKMPAGEQECEYNKEGKYYSKGVKLVRKKKKIPGYRWGDIKINIIGEKDDLPIHFCDKCDLPIKIYGRIIPCKHAFCYHCANLYDKVGYKVCPRCRYPVLRIEAHKRGSVFMCSIVQQCKRTYLSQKSLQAHIKRRHKRARKQVTSASLEKVRPHIAPPQTEISDIPKRLQDRDHLSYIPPEQHTMVSLPSVQHMLQEQHNQPHKDIQAPPPELSLSLPFPIQWETVSIFTRKHGNLTVDHIQNNSDSGAKKPTPPDYYPECQSQPAVSSPHHIIPQKQHYAPPPSPSSPVNHQMPYPPQDVVTPNSVRSQVPALTTTYDPSSGYIIVKVPPDMNSPPLRAPQSQNGNPSASEFASHHYNLNILPQFTENQETLSPQFTQTDAMDHRRWPAWKRLSPCPPTRSPPPSTLHGRSHHSHQRRHRRY

SEQ ID NO: 16317 - protein, 1829 aa, Homo sapiens
MEDTPPSLSCSDCQRHFPSLPELSRHRELLHPSPNQDSEEADSIPRPYRCQQCGRGYRHPGSLVNHRRTHETGLFPCTTCGKDFSNPMALKSHMRTHAPEGRRRHRPPRPKEATPHLQGETVSTDSWGQRLGSSEGWENQTKHTEETPDCESVPDPRAASGTWEDLPTRQREGLASHPGPEDGADGWGPSTNSARAPPLPIPASSLLSNLEQYLAESVVNFTGGQEPTQSPPAEEERRYKCSQCGKTYKHAGSLTNHRQSHTLGIYPCAICFKEFSNLMALKNHSRLHAQYRPYHCPHCPRVFRLPRELLEHQQSHEGERQEPRWEEKGMPTTNGHTDESSQDQLPSAQMLNGSAELSTSGELEDSGLEEYRPFRCGDCGRTYRHAGSLINHRKSHQTGVYPCSLCSKQLFNAAALKNHVRAHHRPRQGVGENGQPSVPPAPLLLAETTHKEEEDPTTTLDHRPYKCSECGRAYRHRGSLVNHRHSHRTGEYQCSLCPRKYPNLMALRNHVRVHCKAARRSADIGAEGAPSHLKVELPPDPVEAEAAPHTDQDHVCKHEEEATDITPAADKTAAHICSICGLLFEDAESLERHGLTHGAGEKENSRTETTMSPPRAFACRDCGKSYRHSGSLINHRQTHQTGDFSCGACAKHFHTMAAMKNHLRRHSRRRSRRHRKRAGGASGGREAKLLAAESWTRELEDNEGLESPQDPSGESPHGAEGNLESDGDCLQAESEGDKCGLERDETHFQGDKESGGTGEGLERKDASLLDNLDIPGEEGGGTHFCDSLTGVDEDQKPATGQPNSSSHSANAVTGWQAGAAHTCSDCGHSFPHATGLLSHRPCHPPGIYQCSLCPKEFDSLPALRSHFQNHRPGEATSAQPFLCCLCGMIFPGRAGYRLHRRQAHSSSGMTEGSEEEGEEEGVAEAAPARSPPLQLSEAELLNQLQREVEALDSAGYGHICGCCGQTYDDLGSLERHHQSQSSGTTADKAPSPLGVAGDAMEMVVDSVLEDIVNSVSGEGGDAKSQEGAGTPLGDSLCIQGGESLLEAQPRPFRCNQCGKTYRHGGSLVNHRKIHQTGDFLCPVCSRCYPNLAAYRNHLRNHPRCKGSEPQVGPIPEAAGSSELQVGPIPEGGSNKPQHMAEEGPGQAEVEKLQEELKVEPLEEVARVKEEVWEETTVKGEEIEPRLETAEKGCQTEASSERPFSCEVCGRSYKHAGSLINHRQSHQTGHFGCQACSKGFSNLMSLKNHRRIHADPRRFRCSECGKAFRLRKQLASHQRVHMERRGGGGTRKATREDRPFRCGQCGRTYRHAGSLLNHRRSHETGQYSCPTCPKTYSNRMALKDHQRLHSENRRRRAGRSRRTAVRCALCGRSFPGRGSLERHLREHEETEREPANGQGGLDGTAASEANLTGSQGLETQLGGAEPVPHLEDGVPRPGERSQSPIRAASSEAPEPLSWGAGKAGGWPVGGGLGNHSGGWVPQFLTRSEEPEDSVHRSPCHAGDCQLNGPTLSHMDSWDNRDNSSQLQPGSHSSCSQCGKTYCQSGSLLNHNTNKTDRHYCLLCSKEFLNPVATKSHSHNHIDAQTFACPDCGKAFESHQELASHLQAHARGHSQVPAQMEEARDPKAGTGEDQVVLPGQGKAQEAPSETPRGPGESVERARGGQAVTSMAAEDKERPFRCTQCGRSYRHAGSLLNHQKAHTTGLYPCSLCPKLLPNLLSLKNHSRTHTDPKRHCCSICGKAFRTAARLEGHGRVHAPREGPFTCPHCPRHFRRRISFVQHQQQHQEEWTVAGSGRGHEGSQEEVGTQWRGKSSPKVGGGARSERREPRGF

SEQ ID NO: 16318 - protein, 568 aa, Homo sapiens
MAQVDSQDRWGEASPLSSLTEEAHDTQMLSMNLESDDEDGGEAEKEGTADPVACPRGSSPVTHENPDLPWPHPLGKEEEKFSDSSSAGGMGQKPVEMSGKASWSRDVTKINETQGSPGASRALGSLPSGLAHKLLGQMQPLGDRLPAGDDGYSGANQDAVLDVPPSFPSNGKYLCAHKSVDTSAGNSSLLCFPRPGSNWDLPTQETHTPAQASATPASLAAAVLAKARNSRKVQNQAGRREGGEAEARPYRCLRGGRAFQKPSKPLSPAETRGGAAKRYACELCGKAYSHRGTLQQHRRLHTGERPYQCSFCDKAYTWSSDHRKHIRTHTGEKPYPCPDCGKAFVRSSDLRKHQRNMHSNNKPFPCSECGLTFNKPLSLLRHQRTHLGAKPFRCPACDREFAVASRMVEHQRVHSGERPFPCPTCGKCFTKSSNLSEHQTLHTGQRPFKCADCGVAFAQPSRLVRHQRIHTGERPFPCTQCGQAFARSSTLKRHQQIHSGEKGFLCAECGRAFRIASELAQHIRMHNGERPYQCEDCGQAFTRSNHLQRHRAKHGTCKKEPIPSSSDE

SEQ ID NO: 16319 - protein, 505 aa, Homo sapiens
MTKAQESLTLEDVAVDFTWEEWQFLSPAQKDLYRDVMLENYSNLVSVGYQAGKPDALTKLEQGEPLWTLEDEIHSPAHPEIEKADDHLQQPLQNQKILKRTGQRYEHGRTLKSYLGLTNQSRRYNRKEPAEFNGDGAFLHDNHEQMPTEIEFPESRKPISTKSQFLKHQQTHNIEKAHECTDCGKAFLKKSQLTEHKRIHTGKKPHVCSLCGKAFYKKYRLTEHERAHRGEKPHGCSLCGKAFYKRYRLTEHERAHKGEKPYGCSECGKAFPRKSELTEHQRIHTGIKPHQCSECGRAFSRKSLLVVHQRTHTGEKPHTCSECGKGFIQKGNLNIHQRTHTGEKPYGCIDCGKAFSQKSCLVAHQRYHTGKTPFVCPECGQPCSQKSGLIRHQKIHSGEKPYKCSDCGKAFLTKTMLIVHHRTHTGERPYGCDECEKAYFYMSCLVKHKRIHSREKRGDSVKVENPSTASHSLSPSEHVQGKSPVNMVTVAMVAGQCEFAHILHS

SEQ ID NO: 16320 - protein, 606 aa, Homo sapiens
MSHTASSCQELVENCAVHVAGMAQEDSRRGQVPSSFYHGANQELDLSTKVYKRESGSPYSVLVDTKMSKPHLHETEEQPYFRETRAVSDVHAVKEDRENSDDTEEEEEEVSYKREQIIVEVNLNNQTLNVSKGEKGVSSQSKETPVLKTSSEEEEEESEEEATDDSNDYGENEKQKKKEKIVEKVSVTQRRTRRAASVAAATTSPTPRTTRGRRKSVEPPKRKKRATKEPKAPVQKAKCEEKETLTCEKCPRVFNTRWYLEKHMNVTHRRMQICDKCGKKFVLESELSLHQQTDCEKNIQCVSCNKSFKKLWSLHEHIKIVHGYAEKKFSCEICEKKFYTMAHVRKHMVAHTKDMPFTCETCGKSFKRSMSLKVHSLQHSGEKPFRCENCDERFQYKYQLRSHMSIHIGHKQFMCQWCGKDFNMKQYFDEHMKTHTGEKPFICEICGKSFTSRPNMKRHRRTHTGEKPYPCDVCGQRFRFSNMLKAHKEKCFRVTSPVNVPPAVQIPLTTSPATPVPSVVNTATTPTPPINMNPVSTLPPRPIPHPFSHLHIHPHPHHPHHLPIPPVPHLPPPPALFKSEPLNHRGQSEDNFLRHLAEKNSSAQHH

SEQ ID NO: 16321 - protein, 615 aa, Homo sapiens
MAERALEPEAEAEAEAGAGGEAAAEEGAAGRKARGRPRLTESDRARRRLESRKKYDVRRVYLGEAHGPWVDLRRRSGWSDAKLAAYLISLERGQRSGRHGKPWEQVPKKPKRKKRRRRNVNCLKNVVIWYEDHKHRCPYEPHLAELDPTFGLYTTAVWQCEAGHRYFQDLHSPLKPLSDSDPDSDKVGNGLVAGSSDSSSSGSASDSEESPEGQPVKAAAAAAAATPTSPVGSSGLITQEGVHIPFDVHHVESLAEQGTPLCSNPAGNGPEALETVVCVPVPVQVGAGPSALFENVPQEALGEVVASCPMPGMVPGSQVIIIAGPGYDALTAEGIHLNMAAGSGVPGSGLGEEVPCAMMEGVAAYTQTEPEGSQPSTMDATAVAGIETKKEKEDLCLLKKEEKEEPVAPELATTVPESAEPEAEADGEELDGSDMSAIIYEIPKEPEKRRRSKRSRVMDADGLLEMFHCPYEGCSQVYVALSSFQNHVNLVHRKGKTKVCPHPGCGKKFYLSNHLRRHMIIHSGVREFTCETCGKSFKRKNHLEVHRRTHTGETPLQCEICGYQCRQRASLNWHMKKHTAEVQYNFTCDRCGKRFEKLDSVKFHTLKSHPDHKPT

SEQ ID NO: 16322 - protein, 581 aa, Homo sapiens
MLCNKEFLGGHIVRHAQAHQKKGSFACVICGRKFRNRGLMQKHLKNHVKKIQRQQIAAAQQDDQEVTALEEINCSSSSISFENGNSDSKDLEVETLTASSEGNKEVIPEHVAEFIEIPISVPEDVIENVIENGSPNNSLNNVFKPLTECGDDYEEEEDEEGDYEEDDYDLNQETSVIHKINGTVCHPKDIYATDQEGNFKCPALGCVRIFKRIGFLNKHAMTVHPTDLNVRQTVMKWSKGKCKFCQRQFEDSQHFIDHLNRHSYPNVYFCLHFNCNESFKLPFQLAQHTKSHRIFQAQCSFPECHELFEDLPLLYEHEAQHYLSKTPESSAQPSETILWDVQTDSNPNQEKDSSSNEKQTISLPVSTSKSRKESTEPKTCIESMEKKTDSLVQNGNERSDDTVSNISLIDQKMPDIEPNSENNCSSSDIVNGHSEIEQTPLVSSDPALKIDTNRIRTENGSILPSVVPQEHNTLPVSQAPSKPNLTSEHTSYGLILTKPYVRPLPPSYLDERYLSMPKRRKFLTDRVDACSDQDNVYKKSVKRLRCGKCLTTYCNAEALEAHLAQKKCQTLFGFDSDDESA

SEQ ID NO: 16323 - protein, 491 aa, Homo sapiens
MEEIPAQEAAGSPRVQFQSLETQSECLSPEPQFVQDTDMEQGLTGDGETREENKLLIPKQKISEEVHSYKVRVGRLKHDITQVPETREVYKSEDRLERLQEILRKFLYLEREFRQITISKETFTSEKNNECHEPEKSFSLDSTIDADQRVLRIQNTDDNDKYDMSFNQNSASGKHEHLNLTEDFQSSECKESLMDLSHLNKWESIPNTEKSYKCDVCGKIFHQSSALTRHQRIHTREKPYKCKECEKSFSQSSSLSRHKRIHTREKPYKCEASDKSCEASDKSCSPSSGIIQHKKIHTRAKSYKCSSCERVFSRSVHLTQHQKIHKEMPCKCTVCGSDFCHTSYLLEHQRVHHEEKAYEYDEYGLAYIKQQGIHFREKPYTCSECGKDFRLNSHLIQHQRIHTGEKAHECNECGKAFSQTSCLIQHHKMHRKEKSYECNEYEGSFSHSSDLILQQEVLTRQKAFDCDVWEKNSSQRAHLVQHQSIHTKENS

SEQ ID NO: 16324 - protein, 1059 aa, Homo sapiens
MNMSQASVSFQDVTVEFTREEWQHLGPVERTLYRDVMLENYSHLISVGYCITKPKVISKLEKGEEPWSLEDEFLNQRYPGYFKVDHIKGIREKQEKPLWQEIFISDADKTLSKEGQKVLEKPFNLEIAPELSEKISCKCDSHRMNLPVASQLIISERKYSRKKTEYMNVCEKLQLDIKHEKAHAEEKSYEHGENAKAFSYKKDQHWKFQTLEESFECDGSGQGLYDKTICITPQSFLTGEKSCKDDEFRKNFDKITLFNHMRTDTRGKCSDLNEYGTSCDKTTAVEYNKVHMAMTHYECNERGINFSRKSPLTQSQRTITGWSAFESNKCEENFSQSSAHIVHQKTQAGDKFGEHNECTDALYQKLDFTAHQRIHTEDKFYLSDEHGKCRKSFYRKAHLIQHQRPHSGEKTYQYEECAKSFCSSSHPIQHPGTYVGFKLYECNECGKAFCQNSNLSKHLRIHTKEKPCDNNGCGRSYKSPLIGHQKTDAEMELCGGSEYGKTSHLKGHQRILMGEKPYECIECGKTFSKTSHLRAHQRIHTGEKPYECVECEKTFSHKTHLSVHQRVHTGEKPYECNDCGKSFTYNSALRAHQRIHTGEKPYECSDCEKTFAHNSALRAHHRIHTGEKPYECNECGRSFAHISVLKAHQRIHTGEKPYECNECGRSFTYNSALRAHQRIHTGRKPYECSDCEKTFAHNSALKIHQRIHTGEKPYECNECEKTFAHNSALRAHQNIHTGEKLYECSECGKTFFQKTRLSTHRRIHTGEKPYECSKCGKTFSQKSYLSGHERIHTGEKPYECNVCGKTFVYKAALIVHQRIHTGEKPYECNQCGKTFSQRTHLCAHQRIHTGEKPYECNECGKTFADNSALRAHHRIHTGEKPYECNDCGKTFSKTSHLRAHLRTRSGEKPYECSECGKTFSEKSYVSAHQRVHTGEKPYECNVCGKPFAHNSTLRVHQRIHTGEKSYECNDCGKTFSQKSHLSAHQRIHTGEKPYECNECGKAFAQNSTLRVHQRIHTGEKPYECDECGKTFVRKAALRVHHTRMHTREKTLACNGFGKS

SEQ ID NO: 16325 - protein, 819 aa, Homo sapiens
MMNLEKNFDKTTLFNHMRTDKRGKCSDLNEYGTSCDKTTAVEYNKVHMAMTHYECNERGINFSRKSPLTQSQRTITGWSAFESNKCEENFSQSSAHIVHQKTQAGDKFGEHNECTDALYQKLDFTAHQRIHTDFTAHQKFYLSDEHGKCRKSFYWKAHLIQHERPHSGEKTYQYEECAKSFCSSSHPIQHPGTYVGFKLYECNECGKAFCQNSNLSKHLRIHTKEKPCDNNGCGRSYKSPLIGHQKTDAEMELCGGSEYGKTSHLKGHQRILMGEKPYECIECGKTFSKTSHLRAHQRIHTGEKPYECVECEKTFSHKTHLSVHQRVHTGEKPYECNDCGKSFTYNSALRAHQRIHTGEKPYECSDCEKTFAHNSALRAHHRIHTGEKPYECNECGRSFAHISVLKAHQRIHTREKPYECNECGRSFTYNSALRAHQRIHTGRKPYECSDCEKTFAHNSALKIHQRIHTGEKPYKCNECEKTFAHNSALRAHQNIHTGEKLYECSECGKTFFQKTRLSTHRRIHTGEKPYECSKCGKTFSQKSYLSGHERIHTGEKPYECNVCGKTFVYKAALIVHQRIHTGEKPYECNECGKTFSQRTHLCAHQRIHTGEKPYECNECGKTFADNSALRAHHRIHTGEKPYECNDCGKTFSKTSHLRAHLRTRSGEKPYECSECGKTFSEKSYVSAHQRVHTGEKPYECNVCGKPFAHNSTLRVHQRIHTGEKSYECNDCGKTFSQKSHLSAHQRIHTGEKPYECNECGKAFAQNSTLRVHQRIHTGEKPYECDECGKTFVRKAALRVHHTRMHTREKTLACNGFGKS

SEQ ID NO: 16326 - protein, 573 aa, Homo sapiens
MGPLQFRDVAIEFSLEEWHCLDMAQRNLYRDVMLENYRNLVFLGIVVSKPDLITHLEQGKKPSTMQRHEMVANPSVLCSHFNQDLWPEQSIKDSFQKLILRRHKKCGHDNLQLKKGCESVDKCKVHKRGYNGLNQCLTTTQSKMFQCDKHGKVFHQFSNTNRHKIRHTGKNPCKFTECGKAFNRSSTFTTHKKIHTGEKPYKCIECGKAFNRSSHLTTHKIIHTGEKRYKCEDCGKAFNRSSNLTTHKKIHTGEKPYKCEECGKAFKRSSILTTHKRIHTGEKPYKCEECGKVFKYLSSLSTHKIIHTGEKPYKCEECGKAFNWSSHLTTHKRIHTGEKPYKCEECGKGFKYSSTLTKHKIIHTGEKPYKCEECGEAFKYSCSLTAHKIIHTGKKPYKCEECGKVFKHSSPLSKHKRIHTGEKPYKCEECGKAFSRSSILTTHKIIHTGEKPYECEDCGKAFNRSSNLTKHKKIHTGEKPYKCEECGKAFKCSSILTTHKRIHTADKPYKCEECGKDFKYSSTLTRHKKIHTGGKPHKCNKCGKAFISSSNLSRHEIIHMGGNPYKCENVAKP

SEQ ID NO: 16327 - protein, 331 aa, Homo sapiens
MRRKTRNFKHKTVKDNKVLTEGSDQESEKDNSQCCDPATNERVQAEKRQYVCTECGKAFSQSANLTVHERIHTGEKPYKCKECGKAFSHSSNLVVHRRIHTGLKPYTCSECGKSFSGKSHLIRHQGIHSGEKTYECKECGKAFSRSSGLISHHRVHTGEKPYSCIECGKAFSRSSNLTQHQRMHRGKKVYKCKECGKTCGSNTKIMDHQRIHTGEKPYECDECGKTFILRKTLNEHQRLHRREKPYKCNECGKAFTSNRNLVDHQRVHTGEKPYKCNECGKTFRQTSQVILHLRTHTKEKPYKCSECGKAYRYSSQLIQHQRKHNEEKETS

SEQ ID NO: 16328 - protein, 426 aa, Homo sapiens
MLENYGAVASLAAFPFPKPALISQLERGETPWCSVPRGALDGEAPRGISSGYPFLKPAGISHPEQVEEPLNLKLQGEGPSLICPEGVLKRKKEDFILKEEIIEEAQDLMVLSSGPQWCGSQELWFGKTCEEKSRLGRWPGYLNGGRMESSTNDIIEVIVKDEMISVEESSGNTDVNNLLGIHHKILNEQIFYICEECGKCFDQNEDFDQHQKTHNGEKVYGCKECGKAFSFRSHCIAHQRIHSGVKPYECQECAKAFVWKSNLIRHQRIHTGEKPFECKECGKGFSQNTSLTQHQRIHTGEKPYTCKECGKSFTRNPALLRHQRMHTGEKPYECKDCGKGFMWNSDLSQHQRVHTGDKPHECTDCGKSFFCKAHLIRHQRIHTGERPYKCNDCGKAFSQNSVLIKHQRRHARDKPYNCQISHLLEH

SEQ ID NO: 16329 - protein, 261 aa, Homo sapiens
MIYKCPMCREFFSERADLFMHQKIHTAEKPHKCDKCDKGFFHISELHIHWRDHTGEKVYKCDDCGKDFSTTTKLNRHKKIHTVEKPYKCYECGKAFNWSSHLQIHMRVHTGEKPYVCSECGRGFSNSSNLCMHQRVHTGEKPFKCEECGKAFRHTSSLCMHQRVHTGEKPYKCYECGKAFSQSSSLCIHQRVHTGEKPYRCCGCGKAFSQSSSLCIHQRVHTGEKPFKCDECGKAFSQSTSLCIHQRVHTKERNHLKISVI

SEQ ID NO: 16330 - protein, 613 aa, Homo sapiens
MGEAFYTVKLERLESCDTVGLSFQEVQKNTYDFECQWKDDEGNYKTVLMLQKENLPGRRAQRDRRAAGNRHIENQLGVSFQSHLPELQQFQHEGKIYEYNQVEKSPNNRGKHYKCDECGKVFSQNSRLTSHKRIHTGEKPYQCNKCGKAFTVRSNLTIHQVIHTGEKPYKCNECGKVFSQPSNLAGHQRIHTGEKPYKCNECGKAFRAHSKLTTHQVIHTGEKPYKCKECGKCFTQNSHLASHRRIHTGEKPYKCNECGKAFSVRSSLTTHQTIHTGEKPYKCNECGKVFRHNSYLAKHRRIHTGEKPYKCNECGKAFSMHSNLTKHQIIHTGEKPFKCNECVKVFTQYSHLANHRRIHTGEKPYRCDECGKAFSVRSSLTTHQAIHTGEKPYKCNDCGKVFTQNSHLASHRGIHSGEKPYKCDECGKAFSQTSQLARHWRVHTGEKPYKCNECGKAFSVHSSLTIHQTIHTGQKPYKCNDCGKVFRHNSYLAIHQRIHTGEKPYKCNECGKAFSVHSNLATHQVIHTGEKPYKCNECGKVFTQNSHLANHRRIHTGEKPYRCNECGKAFSVRSTLTTHMAVHTGDKPYKCNQCGKVFTQNSNLAKHRRIHSG

SEQ ID NO: 16331 - protein, 610 aa, Homo sapiens
MPSARGKSKSKAPITFGDLAIYFSQEEWEWLSPIQKDLYEDVMLENYRNLVSLGLSFRRPNVITLLEKGKAPWMVEPVRRRRAPDSGSKCETKKLPPNQCNKSGQSICQKLVSAQQKAPTRKSGCNKNSVLVKPKKGHSGKKPLKCNDCGKTFSRSFSLKLHQNIHTGEKPFECSNCRKAFRQISSILLHQRIHSGKKSHECNKCGESFNQRTTLILHMRIHDGKEILDCGKALSQCQSFNIHQKIHVVGNVCQCRKCGKAFNQMSSLLLHKKIHNGKKTHKYNKCGRGFKKKSVFVVHKRIHAGEKIPENAKALSQSLQQRSHHLENPFKCRKCGKLFNRISPLMLHQRIHTSEKPYKCDKCDKFFRRLSTLILHLRIHNGEKLYRCNKCEKVCNRHSSLIQHQKVHTKKKKLFECKECGKMFSGTANLKIHQNIHSEEKPFKCNKCSKVFGRQSFLIEHQRIHTGEKPYQCEECGKAFSHRISLTRHKRIHTEDRPYECDQCGKAFSQSAHLAQHERIHTGEKPYTCKTCGKAFSQRTSLILHERSHTGEKPYECNECGKAFSSGSDLIRHQRSHSSEKPYECSKCGKAYSRSSSLIRHQNTHSEEKA

SEQ ID NO: 16332 - protein, 619 aa, Homo sapiens [sequence omitted]

SEQ ID NO: 16333 - protein, 464 aa, Homo sapiens
MVSGLRLASRSGEEGWLKPAVARLGPPRHRLRNLRTESPWRSRGSVLFCSGPGRAGRAAEPLHPVCTCGRHFRRPEPCREPLASPIQDSVAFEDVAVNFTQEEWALLDSSQKNLYREVMQETCRNLASVGSQWKDQNIEDHFEKPGKDIRNHIVQRLCESKEDGQYGEVVSQIPNLDLNENISTGLKPCECSICGKVFVRHSLLNRHILAHSGYKPYGEKQYKCEQCGKFFVSVPGVRRHMIMHSGNPAYKCTICGKAFYFLNSVERHQRTHTGEKPYKCKQCGKAFTVSGSCLIHERTHTGEKPYECKECGKTFRFSCSFKTHERTHTGERPYKCTKCDKAFSCSTSLRYHGSIHTGERPYECKQCGKAFSRLSSLCNHRSTHTGEKPYECKQCDQAFSRLSSLHLHERIHTGEKPYECKKCGKAYTRSSHLTRHERSHDIEAGCSDSAYNPSTLGGQGVWIA

SEQ ID NO: 16334 - protein, 389 aa, Homo sapiens
MDSVSFEDVAVAFTQEEWALLDPSQKNLYRDVMQEIFRNLASVGNKSEDQNIQDDFKNPGRNLSSHVVERLFEIKEGSQYGETFSQDSNLNLNKKVSTGVKPCECSVCGKVFICHSALHRHILSHIGNKLFECEECPEKLYHCKQCGKAFISLTSVDRHMVTHTSNGPYKGPVYEKPFDFPSVFQMPQSTYTGEKTYKCKHCDKAFNYSSYLREHERTHTGEKPYACKKCGKSFTFSSSLRQHERSHTGEKPYECKECGKAFSRSTYLGIHERTHTGEKPYECIKCGKAFRCSRVLRVHERTHSGEKPYECKQCGKAFKYSSNLCEHERTHTGVKPYGCKECGKSFTSSSALRSHERTHTGEKPYECKKCGKAFSCSSSLRKHERAYMW

SEQ ID NO: 16335 - protein, 534 aa, Homo sapiens
MLSPVSRDASDALQGRKCLRPRSRRLPLPAAVRAHGPMAELTDSARGCVVFEDVFVYFSREEWELLDDAQRLLYHDVMLENFALLASLGIAFSRSRAVMKLERGEEPWVYDQVDMTSATEREAQRGLRPGCWHGVEDEEVSSEQSIFVAGVSEVRTLMAELESHPCDICGPILKDTLHLAKYHGGKARQKPYLCGACGKQFWFSTDFDQHQNQPNGGKLFPRKEGRDSVKSCRVHVPEKTLTCGKGRRDFSATSGLLQHQASLSSMKPHKSTKLVSGFLMGQRYHRCGECGKAFTRKDTLARHQRIHTGERPYECNECGKFFSQSYDLFKHQTVHTGERPYECSECGKFFRQISGLIEHRRVHTGERLYQCGKCGKFFSSKSNLIRHQEVHTGARPYVCSECGKEFSRKHTLVLHQRTHTGERPYECSECGKAFSQSSHLNVHWRIHSSDYECSRCGKAFSCISKLIQHQKVHSGEKPYECSKCGKAFTQRPNLIRHWKVHTGERPYVCSECGREFIRKQTLVLHQRVHAGEKL

SEQ ID NO: 16336 - protein, 452 aa, Homo sapiens
MFATSGAVAAGKPYSCSECGKSFCYSSVLLRHERAHGGDGRFRCLECGERCARAADLRAHRRTHAGQTLYICSECGQSFRHSGRLDLHLGAHRQRCRTCPCRTCGRRFPHLPALLLHRRRQHLPERPRRCPLCARTFRQSALLFHQARAHPLGTTSDPAAPPHRCAQCPRAFRSGAGLRSHARIHVSRSPTRPRVSDAHQCGVCGKCFGKSSTLTRHLQTHSGEKPFKCPECGKGFLESATLVRHQRTHTGEKPYACGDCGRCFSESSTLLRHRRSHQGERPHACATCGKGFGQRSDLVVHQRIHTGEKPFACPECGRRFSDRSDLTKHRRTHTGEKPYRCELCGKRFTCVSNLNVHRRNHAGHKPHKCPECSKAFSVASKLALHRKTHLGERPAECAECGKCFSHSRSLSQHQRAHTRARTAAAVAIQSAVGTALVFEGPAEQEKPGFSVS

SEQ ID NO: 16337 - protein, 581 aa, Homo sapiens
MAMSQESLTFKDVFVDFTLEEWQQLDSAQKNLYRDVMLENYSHLVSVGHLVGKPDVIFRLGPGDESWMADGGTPVRTCAGEDRPEVWEVDEQIDHYKESQDKFLWQAAFIGKETLKDESGQECKICRKIIYLNTDFVSVKQRLPKYYSWERCSKHHLNFLGQNRSYVRKKDDGCKAYWKVCLHYNLHKAQPAERFFDPNQRGKALHQKQALRKSQRSQTGEKLYKCTECGKVFIQKANLVVHQRTHTGEKPYECCECAKAFSQKSTLIAHQRTHTGEKPYECSECGKTFIQKSTLIKHQRTHTGEKPFVCDKCPKAFKSSYHLIRHEKTHIRQAFYKGIKCTTSSLIYQRIHTSEKPQCSEHGKASDEKPSPTKHWRTHTKENIYECSKCGKSFRGKSHLSVHQRIHTGEKPYECSICGKTFSGKSHLSVHHRTHTGEKPYECRRCGKAFGEKSTLIVHQRMHTGEKPYKCNECGKAFSEKSPLIKHQRIHTGERPYECTDCKKAFSRKSTLIKHQRIHTGEKPYKCSECGKAFSVKSTLIVHHRTHTGEKPYECRDCGKAFSGKSTLIKHQRSHTGDKNL

SEQ ID NO: 16338 - protein, 568 aa, Homo sapiens
MGLLTFRDVAIEFSLEEWQCLDTAQRNLYKNVILENYRNLVFLGIAVSKQDLITCLEQEKEPLTVKRHEMVNEPPVMCSHFAQEFWPEQNIKDSFEKVTLRRYEKCGNDNFQLKGCKSVDECKLHKGGYNGLNQCLPTMQSKMFQCDKYVKVFNKFSHSDRHKIKHMENKPFKCKECGRSFCMLSHLTRHERNYTKVNFCKCEECEKAVNQSSKLTKHKRIYTCEKLYKCQECDRTFNQFSNLTEYKKDYAREKPYKCEECGKAFNQSSHLTTHKIIHTGEKPYKCEECGKAFNQFSNLTTHKKIHTGEQPYICEECGKAFTQSSTLTTHKRIHTGEKPYKCEECGKAFNRSSKLTEHKNIHTGEQPYKCEECGKAFNRSSNLTEHRKIHTEEKPYKCKECGKAFKHSSALTTHKRIHTGEKPYKCEECGKAFNRSSKLTEHKKLHTGKKPYKCEECGKAFIQSSKLTEHKKIHSGEIPYKCEECGKAFKHSSSLTTHKRIHTGEKPYKCEECGKAFSRSSKLTEHKIIHTGEKPYKCERCDKAFNQSANLTKHKKIHTGEKLQNWNV

SEQ ID NO: 16339 - protein, 588 aa, Homo sapiens
MLENYRNLVFLGIAAFKPDLIIFLEQGKEPWNMKRHEMVEEPPVICSHFSQEFWPEQGIEDSFQKMILRRYDKCGHENLHLKISCTNVDECNVHKEGYNKLNQSLTTTQSKVFQCGKYANVFHKCSNSNRHKIRHTGEKGLKCKEYVRSFCMLSHLSQHERIYTRENSYKCEENGKAFNWSSTLTYYKSIHTGEKPYKCEECGKAFSKFSILTKHKVIHTGEKPYKCEECGKAFNRSSILTKHKIIHTGEKPYKCEECGKGFSSVSTLNTHKAIHAEEKPYKCEECGKASNSSSKLMEHKRIHTGEKPYKCEECGKAFSWSSSLTEHKRIHAGEKPYKCEECGKAFNRSSILTKHKIIHTGEKPYKCEGCGKAFSKVSTLNTHKAIHAEEKPYKCEECGKASNSSSKLMEHKRIHTGEKPYKCEECGKAFSWSSSLTEHKRIHAGEKPYKCEECGKAFTWSSSFTKHKRIHAAEKPYKCEECGKGFSTFSILTKHKIIHTGEKRYKCEECGKAFSWSSILTEHKIIHTGEKPYKCEECGKAFSRSSSLTRHKRIHTGEKPYKCEECGKAFKSSSTVSYHKKIHTGENP

SEQ ID NO: 16340 - protein, 584 aa, Homo sapiens
MALSQGLFTFKDVAIEFSQEEWECLDPAQRALYRDVMLENYRNLLSLDEDNIPPEDDISVGFTSKGLSPKENNKEELYHLVILERKESHGINNFDLKEVWENMPKFDSLWDYDVKNYKGMPLTCNKNLTHRKDQQHNKSSIHFSLKQSVSIRDSAHQYFIHDKPFIRNLLKLKNNIRYAGNKYVKCFENKIGLSLQAQLAELQRFQTGEKMYECNPVEKSINSSSVSPLPPCVKNICNKYRKILKYPLLHTQYGRTHIREKSYKCNDCGKAFSKSSNLTNHQRIHSGQRPYKCNECGKAFNQCSNLTRHQRVHTGEKPYQCNICGKVCSQNSNLASHQRMHTGEKPYKCNECGKAFIQRSHLWGHERIHTGEKPYKCNECDKAFAERSSLTQHKRIHTGEKPYICNECGKAFKQCSHLTRHQNIHPGEKPHKCNVCGRAFIQSSSLVEHQRIHTGEKPYKCNKCDKAFIKRSHLWGHQRTHTGEKPYKCTECGKAFTERSNLTQHKKIHTGEKPYKCTECGKAFTQFANLTRHQKIHIEKKHCKHNIHGNALFQSSNLGDHQKSYNREKHIKYNETKIKYSSCT

SEQ ID NO: 16341 - protein, 525 aa, Homo sapiens
MGTISLCIGVCAFEGANTSTSFYKLVYTAILSYSIQDLLPEQDMKDLCQKVTLTRHRSWGLDNLHLVKDWRTVNEGKGQKEYCNRLTQCSSTKSKIFQCIECGRNFSWRSILTEHKRIHTGEKPYKCEECGKVFNRCSNLTKHKRIHTGEKPYKCDECGKVFNWWSQLTNHKKIHTGEKPYKCDECDKVFNWWSQLTSHKKIHSGEKPYPCEECGKAFTQFSNLTQHKRIHTGEKPYKCKECCKAFNKFSNLTQHKRIHTGEKPYKCEECGNVFNECSHLTRHRRIHTGEKPYKCEECGKAFTQFASLTRHKRIHTGEKPYQCEECGKTFNRCSHLSSHKRIHTGEKPYKCEECGRTFTQFSNLTQHKRIHTGEKPYKCKECGKAFNKFSSLTQHRRIHTGVKPYKCEECGKVFKQCSHLTSHKRIHTGEKPYKCKECGKAFYQSSILSKHKRIHTEEKPYKCEECGKAFNQFSSLTRHKRIHTGEKRYKCKECGKGFYQSSIHSKYKRIYTGEEPDKCKKCGSL

SEQ ID NO: 16342 - protein, 411 aa, Homo sapiens
MAKRPGSPGSREMGLLTFRDVVIEFSLEEWQCLDHAQQNLYRDVMLENYRNLVSLGIAVSKPDLITCLEQNKEPWNIKRNEMVTKHPVMCSHFTQDLPPELGIKDSLQKVIPRRYGKSGHDNLQVKTCKSMGECEVQKGGCNEVNQCLSTTQNKIFQTHKCVKVFGKFSNSNRHKTRHTGKKHFKCKKYGKSFCMVSQLHQHQIIHTRENSYQCEECGKPFNCSSTLSKHKRIHTGEKPYRCEECGKAFTWSSTLTKHRRIHTGEKPYTCEECGQAFSRSSTLANHKRIHTGEKPYTCEECGKAFSLSSSLTYHKRIHTGEKPYTCEECGKAFNCSSTLKKHKIIHTGEKPYKCKECGKAFAFSSTLNTHKRIHTGEEPYKCEECDKAFKWSSSLANHKSMHTGEKPYKCE

SEQ ID NO: 16343 - protein, 530 aa, Homo sapiens
MPGPPGSLEMGPLTFRDVAIEFSLEEWQCLDTAQRNLYRKVMFENYRNLVFLGIAVSKPHLITCLEQGKEPWNRKRQEMVAKPPVIYSHFTEDLWPEHSIKDSFQKVILRGYGKCGHENLQLRISCKSVDESKVFKEGYNELNQCLRTTQSKIFQCDKYVKVFHKFSNSNSHKKRNTGKKVFKCKECGKSFCMLSHLTQHIRIHTRENSYKCEECGKVLNWFSELIKHKGIHMGEKPYKCEECGKAFNQSSTLIKHKKIHIEEKPFKCEECGKAFSLFSILSKHKIIHTGDKPYKCDECHKAFNWFATLTNHKRIHTGEKPFKCEECGKDFNQFSNLTKHKKIHTGEKPYKCEECGKAFNQFANLTRHKKIHTGEKSYKCEECGKAFIQSSNLTEHMRIHTGEKPYKCEECGKAFNGCSSLTRHKRIHTRENTYKCEECGKGFTLFSTLTNHKVIHTGEKSYKCDECGNVFNWPATLANHKRIHAREKPYKCEECGKAFNRSSHLTRHKKIHTGEKLYKPEKCDNNFDNT

SEQ ID NO: 16344 - protein, 645 aa, Homo sapiens
MEPLKFRDVAIEFSLEEWQCLDTIQQNLYRNVMLENYRNLVFLGIVVSKPDLITCLEQEKEPWTRKRHRMVAEPPVICSHFAQDFSPEQNIKDSFQKVTPRRYGKCEHENLQLSKSVDECKVQKGGYNGLNQCLPTTQSKIFQCDKYMKIFHKFSNLNGHKVRHTRKKPFKYKEFGKSFCIFSNLTQHKIICTRVNFYKCEDCGKAFNGSSIFTKHKRIHIGEKSYICEECGKACNQFTNLTTHKIIYTRDKLYKREECSKAFNLSSHITTHTIIHTGENPYKREECDKAFNQSLTLTTHKIIHTREKLNEYKECGKAFNQSSHLTRHKIIHTGEKPYKCEECGKAFNQSSHLTRHKIIHTGEKPYRCEECGKAFRQSSHLTTHKIIHTGEKPYKCEECGKAFNKSSHLTRHKSIHTGEKPYQCEKCGKASNQSSNLTEHKNIHTEEKPYKCEECGKAFNQFSNLTTHKRIHTGEKPYKCEECGKAFNQSSILTTHKRIHTGEKSYKCEECGKAFYRSSKLTEHKKIHTGEKPYTCEECGKAFNHSSHLATHKVIHTGEKPYQCEECGKAFNQSSHLTRHKRIHTGEKPYQCEKCGKAFNQSSNLTGHKKIHTGEKLYKPKRCNSDFENTSKFSKHKRNYAGEKS

SEQ ID NO: 16345 - protein, 498 aa, Homo sapiens
MELLTFRDVTIEFSLEEWEFLNPAQQSLYRKVMLENYRNLVSLGLTVSKPELISRLEQRQEPWNVKRHETIAKPPAMSSHYTEDLLPEQCMQDSFQKVILRRYGSCGLEDLHLRKDGENVGECKDQKEIYNGLNQCLSTLPSKIFPYNKCVKVFSKSSNLNRENIRHTTEKLFKCMQCGKVFKSHSGLSYHKIIHTEEKLCICEECGKTFKWFSYLTKHKRIHTGEKPYKCEECGKAFNWCSSLTKHKRIHTGEKPYKCEECGKAFHWCSPFVRHKKIHTGEKPYTCEDCGRAFNRHSHLTKHKTIHTGKKPYKCKECGKAFNHCSLLTIHERTHTGEKPYKCEECGKAFNSSSILTEHKVIHSGEKPYKCEKCDKVFKRFSYLTKHKRIHTGEKPYKCEECGKAFNWSSILTEHKRIHTGEKPYNCEECGKAFNRCSHLTRHKKIHTAVKRYKCEECGKAFKRCSHLNEHKRVQRGEKSCKYKKCGEAFNHCSNLTT

SEQ ID NO: 16346 - protein, 524 aa, Homo sapiens
MKEESAAQLGCCHRPMALGGTGGSLSPSLDFQLFRGDQVFSACRPLPDMVDAHGPSCASWLCPLPLAPGRSALLACLQDLDLNLCTPQPAPLGTDLQGLQEDALSMKHEPPGLQASSTDDKKFTVKYPQNKDKLGKQPERAGEGAPCPAFSSHNSSSPPPLQNRKSPSPLAFCPCPPVNSISKELPFLLHAFYPGYPLLLPPPHLFTYGALPSDQCPHLLMLPQDPSYPTMAMPSLLMMVNELGHPSARWETLLPYPGAFQASGQALPSQARNPGAGAAPTDSPGLERGGMASPAKRVPLSSQTGTAALPYPLKKKNGKILYECNICGKSFGQLSNLKVHLRVHSGERPFQCALCQKSFTQLAHLQKHHLVHTGERPHKCSIPWVPGRNHWKSFQAWREREVCHKRFSSSSNLKTHLRLHSGARPFQCSVCRSRFTQHIHLKLHHRLHAPQPCGLVHTQLPLASLACLAQWHQGALDLMAVASEKHMGYDIDEVKVSSTSQGKARAVSLSSAGTPLVMGQDQNN

SEQ ID NO: 16347 - protein, 378 aa, Homo sapiens
MISFQESVTFQDVAVDFTAEEWQLLDCAERTLYWDVMLENYRNLISVGCPITKTKVILKVEQGQEPWMVEGANPHESSPESDYPLVDEPGKHRESKDNFLKSVLLTFNKILTMERIHHYNMSTSLNPMRKKSYKSFEKCLPPNLDLLKYNRSYTVENAYECSECGKAFKKKFHFIRHEKNHTRKKPFECNDCGKAYSRKAHLATHQKIHNGERPFVCNDCGKAFMHKAQLVVHQRLHTGEKPYECSQCGKTFTWNSSFNQHVKSHTLEKSFECKECGKTFRYSSSLYKHSRFHTGEKPYQCIICGKAFGNTSVLVTHQRIHTGEKPYSCIECGKAFIKKSHLLRHQITHTGEKPYECNRCGKAFSQKSNLIVHQKIHT

SEQ ID NO: 16348 - protein, 1237 aa, Homo sapiens
MGDMKTPDFDDLLAAFDIPDIDANEAIHSGPEENEGPGGPGKPEPGVGSESEDTAAASAGDGPGVPAQASDHGLPPPDISVVSVIVKNTVCPEQSEALAGGSAGDGAQAAGVTKEGPVGPHRMQNGFGSPEPSLPGTPHSPAPPSGGTWKEKGMEGKTPLDLFAHFGPEPGDHSDPLPPSAPSPTREGALTPPPFPSSFELAQENGPGMQPPVSSPPLGALKQESCSPHHPQVLAQQGSGSSPKATDIPASASPPPVAGVPFFKQSPGHQSPLASPKVPVCQPLKEEDDDEGPVDKSSPGSPQSPSSGAEAADEDSNDSPASSSSRPLKVRIKTIKTSCGNITRTVTQVPSDPDPPAPLAEGAFLAEASLLKLSPATPTSEGPKVVSVQLGDGTRLKGTVLPVATIQNASTAMLMAASVARKAVVLPGGTATSPKMIAKNVLGLVPQALPKADGRAGLGTGGQKVNGASVVMVQPSKTATGPSTGGGTVISRTQSSLVEAFNKILNSKNLLPAYRPNLSPPAEAGLALPPTGYRCLECGDAFSLEKSLARHYDRRSMRIEVTCNHCARRLVFFNKCSLLLHAREHKDKGLVMQCSHLVMRPVALDQMVGQPDITPLLPVAVPPVSGPLALPALGKGEGAITSSAITTVAAEAPVLPLSTEPPAAPATSAYTCFRCLECKEQCRDKAGMAAHFQQLGPPAPGATSNVCPTCPMMLPNRCSFSAHQRMHKNRPPHVCPECGGNFLQANFQTHLREACLHVSRRVGYRCPSCSVVFGGVNSIKSHIQTSHCEVFHKCPICPMAFKSGPSAHAHLYSQHPSFQTQQAKLIYKCAMCDTVFTHKPLLSSHFDQHLLPQRVSVFKCPSCPLLFAQKRTMLEHLKNTHQSGRLEETAGKGAGGALLTPKTEPEELAVSQGGAAPATEESSSSSEEEEVPSSPEPPRPAKRPRRELGSKGLKGGGGGPGGWTCGLCHSWFPERDEYVAHMKKEHGKSVKKFPCRLCERSFCSAPSLRRHVRVNHEGIKRVYPCRYCTEGKRTFSSRLILEKHVQVRHGLQLGAQSPGRGTTLARGSSARAQGPGRKRRQSSDSCSEEPDSTTPPAKSPRGGPGSGGHGPLRYRSSSSTEQSLMMGLRVEDGAQQCLDCGLCFASPGSLSRHRFISHKKRRGVGKASALGLGDGEEEAPPSRSDPDGGDSPLPASGGPLTCKVCGKSCDSPLNLKTHFRTHGMAFIRARQGAVGDN

SEQ ID NO: 16349 - protein, 276 aa, Homo sapiens
MAPPPAPLLAPRPGETRPGCRKPGTVSFADVAVYFSPEEWGCLRPAQRALYRDVMQETYGHLGALGFPGPKPALISWMEQESEAWSPAAQDPEKGERLGGARRGDVPNRKEEEPEEVPRAKGPRKAPVKESPEVLVERNPDPAISVAPARAQPPKNAAWDPTTGAQPPAPIPSMDAQAGQRRHVCTDCGRRFTYPSLLVSHRRMHSGERPFPCPECGMRFKRKFAVEAHQWIHRSCSGGRRGRRPGIRAVPRAPVRGDRDPPVLFRHYPDIFEECG

SEQ ID NO: 16350 - protein, 500 aa, Homo sapiens
MAPPSAPLPAQGPGKARPSRKRGRRPRALKFVDVAVYFSPEEWGCLRPAQRALYRDVMRETYGHLGALGCAGPKPALISWLERNTDDWEPAALDPQEYPRGLTVQRKSRTRKKNGEKEVFPPKEAPRKGKRGRRPSKPRLIPRQTSGGPICPDCGCTFPDHQALESHKCAQNLKKPYPCPDCGRRFSYPSLLVSHRRAHSGECPYVCDQCGKRFSQRKNLSQHQVIHTGEKPYHCPDCGRCFRRSRSLANHRTTHTGEKPHQCPSCGRRFAYPSLLAIHQRTHTGEKPYTCLECNRRFRQRTALVIHQRIHTGEKPYPCPDCERRFSSSSRLVSHRRVHSGERPYACEHCEARFSQRSTLLQHQLLHTGEKPYPCPDCGRAFRRSGSLAIHRSTHTEEKLHACDDCGRRFAYPSLLASHRRVHSGERPYACDLCSKRFAQWSHLAQHQLLHTGEKPFPCLECGRCFRQRWSLAVHKCSPKAPNCSPRSAIGGSSQRGNAH

SEQ ID NO: 16351 - protein, 566 aa, Homo sapiens
MPCCSHRRCREDPGTSESQEMDPVAFDDVAVNFTQEEWALLDISQRKLYKEVMLETFRNLTSVGKSWKDQNIEYEYQNPRRNFRSLIEKKVNEIKDDSHCGETFTQVPDDRLNFQEKKASPEIKSCDSFVCGEVGLGNSSFNMNIRGDIGHKAYEYQEYGPKPCKCQQPKKAFRYHPSFRTPQRDHTGEKPYACKECGKTFISHSSIQRHVVMHSGDGPYKCKFCGKAFHCLSLYLIHERIHTGEKPYECKQCGKSFSYSATLRIHERTHTGEKPYECQQCGKAFHSPRCYRRHERIHTGEKAYQCKECGKAFTCPQYVRIHERTHSRKKPYECTQCGKALSSLTSFQTHIRMHSGERPYECKICGKGFCSANSFQRHEKTHSGEKPYKCKQCGKAFIHSSSLRYHERIHTGEKPYECKQCGKAFRSSSHLQLHGRTHTGEKPYECQECGKAFRSMKNLQSHERTQTHVRIHSGERPYKCKLCGKGFYCPKSLQRHEKTHTGEKLYECKQCGEAFSSSSSFRYHERTHTGEKPYKCKQCGKAFRAASVLRMHGRTHPEDKPYECKQ

SEQ ID NO: 16352 - protein, 312 aa, Homo sapiens
MSLCSPTHSAEMSLFLQGPEEMLPLSSEGSEMGSEKEQSPEPHLPEEGEGGKPWRVDDSEGSWIPPGEKEHGQESLSDELQETHPKKPWQKVTVRARELGDPIAHPRHEADEKPFICAQCGKTFNNTSNLRTHQRIHTGEKPYKCSECGKSFSRSSNRIRHERIHLEEKHYKCPKCQESFRRRSDLTTHQQDHLGKRPYRCDICGKSFSQSATLAVHHRTHLEPAPYICCECGKSFSNSSSFGVHHRTHTGERPYECTECGRTFSDISNFGAHQRTHRGEKPYRCTVCGKHFSRSSNLKPFIPLWRMVLYSL

SEQ ID NO: 16353 - protein, 519 aa, Homo sapiens
MASSPAVDVSCRRREKRRQLDARRSKCRIRLGGHMEQWCLLKERLGFSLHSQLAKFLLDRYTSSGCVLCAGPEPLPPKGLQYLVLLSHAHSRECSLVPGLRGPGGQDGGLVWECSAGHTFSWGPSLSPTPSEAPKPASLPHTTRRSWCSEATSGQELADLESEHDERTQEARLPRRVGPPPETFPPPGEEEGEEEEDNDEDEEEMLSDASLWTYSSSPDDSEPDAPRLLPSPVTCTPKEGETPPAPAALSSPLAVPALSASSLSSRAPPPAEVRVQPQLSRTPQAAQQTEALASTGSQAQSAPTPAWDEDTAQIGPKRIRKAAKRELMPCDFPGCGRIFSNRQYLNHHKKYQHIHQKSFSCPEPACGKSFNFKKHLKEHMKLHSDTRDYICEFCARSFRTSSNLVIHRRIHTGEKPLQCEICGFTCRQKASLNWHQRKHAETVAALRFPCEFCGKRFEKPDSVAAHRSKSHPALLLAPQESPSGPLEPCPSISAPGPLGSSEGSRPSASPQAPTLLPQQ

SEQ ID NO: 16354 - protein, 515 aa, Homo sapiens
MGLLAFRDVALEFSPEEWECLDPAQRSLYRDVMLENYRNLISLGEDSFNMQFLFHSLAMSKPELIICLEARKEPWNVNTEKTARHSVLSSYLTEDILPEQGLQVSFQKVMLRRYERCCLEKLRLRNDWEIVGEWKGQKASYNGLDLCSATTHSKNFQCNKCVKGFSKFANLNKCKISHTGEKPFKCKECGNVSCMSLIMTQQQRIHIGENPYQCKKCGKAFNECSCFTDCKRIHVGEKHCKCEECNNIFKSCSSLAVVEKNHTEKKTYRCEECGKAFNLCSVLTKHKKIHTGEKPYKCEECGKSFKLFPYLTQHKRIHSREKPYKCEECGKVFKLLSYLTQHRRIHTGEKTFRCEECGKAFNQSSHLTEHRRIHTGEKPYKCEECGKAFTWFSYLIQHKRIHTGQKPYKCEECGKAFTWFSYLTQHKRIHTGEKPYKCDECGKAFNWFSYLTNHKRIHTGEKPYKCEECGKAFGQSSHLSKHKTIHTREKPYKCEECGKAFNHSAQLAVHEKTHT

SEQ ID NO: 16355 - protein, 374 aa, Homo sapiens
MEPGGEPTGAKESSTLMESLAAVKAAFLAQAPSGSRSAEVQAAQSTEPAAEAGAPEGEGHRGGPPRALGSLGLCENQEARERPGGSPRGPVTSEKTGGQSGLESDVPPNAGPGAEGGGSWKGRPFPCGACGRSFKCSSDAAKHRSIHSGEKPYECSDCGKAFIHSSHVVRHQRAHSGERPYACAECGKAFGQSFNLLRHQRVHTGEKPYACADCGKAFGQRSDAAKHRRTHTGERLYACGECGKRFLHSSNVVRHRRTHHGENPYECRECGQAFSQSSNLLQHQRVHTGERPFACQDCGRAFSRSSFLREHRRIHTGEKPHQCGHCGRAFRALSGFFRHQRLHTGEKPFRCTECGRAFRLSFHLIQHRRVHGAE

SEQ ID NO: 16356 - protein, 545 aa, Homo sapiens
MKQEDNQGVCAHQDSEDKGMGSDFEDSEDREGDPEEREMGSNPHDTNKREGHPEPEMGSNPQDSRHREAVPDICTEGQLSEEEGVSVRGEEDDQSGVADMAMFPGLSESDSISRSLREDDDESAGENRLEEEEEQPAPPVLPWRRHLSLGSRHRGDKPAHRRFHRLHHPMAVDLGELDSLVASIMDAPTICPDCGESFSPGAAFLQHQRIHRLAEAAAAASLEPFGLAGECDAMVGMMGVGVAGGFGAGPPLARPPREKPFRCGECGKGFSRNTYLTNHLRLHTGERPNLCADCGKSFSWRADLLKHRRLHTGEKPYPCPECGEAFSLSSHLLSHRRAHAAASGAGAAALRPFACGECGKGFVRRSHLANHQRIHTGEKPHGCGECGKRFSWRSDLVKHQRVHTGEKPYMCSECGETFSVSSHLFTHKRTHSGERPYVCRECGKGFGRNSHLVNHLRVHTGEKPFRCGQCEKRFSDFSTLTQHQRTHTGEKPYTCIECGKSFIQSSHLIRHRRIHTGNKPHKCAGCGKGFRYKTHLAQHQKLHLC

SEQ ID NO: 16357 - protein, 642 aa, Homo sapiens
MEEERKTAELQKNRIQDSVVFEDVAVDFTQEEWALLDLAQRNLYRDVMLENFQNLASLGYPLHTPHLISQWEQEEDLQTVKRELIQGIFMGEHREGFETQLKTNESVASQDICGEKISNEQKIVRFKRNDSWFSSLHENQESCGIDYQNKSHERHLRNHMVENIYECYEENQDGQTFSQVPNLDSLKRNTEVKSCECHECGKAFVDHSSLKSHIRSHTGSKPYQCKECGKAFHFLACFKKHMKTPTEEKPYECKECTKAFSCSSFFRAHMKIHIGKTNYECKECGKGFSCSSSLTEHKRIHSGDKPYECKECGKAFSCSSSLSKHKRIHSGDKPYECKECGKAFSSSSHLIIHIRIHTGEKPYECKECGKAFSESSKLTVHGRTHTGEKPYKCKECGKAYNCPSSLSIHMRKHTGEKPYECLECGKAFYLPTSLNTHVKNQSREKPYECKECGKAFSCPSSFRAHVRDHTGKIQYECKECGKTFSRSSSLTEHLRTHSGEKPYECKECGKAFISSSHLTVHIRTHTGEKPYECKKCGKAFIYPSALRIHMRTHTGEKPYECKECGKAFRHSSYLTVHARMHTGEKPFECLECGKAFSCPSSFRRHVRSHTGEKPYECKECGKAFVCPAYFRRHVKTHTRENI

SEQ ID NO: 16358 - protein, 686 aa, Homo sapiens
MEVVTFGDVAVHFSREEWQCLDPGQRALYREVMLENHSSVAGLAGFLVFKPELISRLEQGEEPWVLDLQGAEGTEAPRTSKTDSTIRTENEQACEDMDILKSESYGTVVRISPQDFPQNPGFGDVSDSEVWLDSHLGSPGLKVTGFTFQNNCLNEETVVPKTFTKDAPQGCKELGSSGLDCQPLESQGESAEGMSQRCEECGKGIRATSDIALHWEINTQKISRCQECQKKLSDCLQGKHTNNCHGEKPYECAECGKVFRLCSQLNQHQRIHTGEKPFKCTECGKAFRLSSKLIQHQRIHTGEKPYRCEECGKAFGQSSSLIHHQRIHTGERPYGCRECGKAFSQQSQLVRHQRTHTGERPYPCKECGKAFSQSSTLAQHQRMHTGEKAQILKASDSPSLVAHQRIHAVEKPFKCDECGKAFRWISRLSQHQLIHTGEKPYKCNKCTKAFGCSSRLIRHQRTHTGEKPFKCDECGKGFVQGSHLIQHQRIHTGEKPYVCNDCGKAFSQSSSLIYHQRIHKGEKPYECLQCGKAFSMSTQLTIHQRVHTGERPYKCNECGKAFSQNSTLFQHQIIHAGVKPYECSECGKAFSRSSYLIEHQRIHTRAQWFYEYGNALEGSTFVSRKKVNTIKKLHQCEDCEKIFRWRSHLIIHQRIHTGEKPYKCNDCGKAFNRSSRLTQHQKIHMG

SEQ ID NO: 16359 - protein, 446 aa, Homo sapiens
MEVPPATKFGETFAFENRLESQQGLFPGEDLGDPFLQERGLEQMAVIYKEIPLGEQDEENDDYEGNFSLCSSPVQHQSIPPGTRPQDDELFGQTFLQKSDLSMCQIIHSEEPSPCDCAETDRGDSGPNAPHRTPQPAKPYACRECGKAFSQSSHLLRHLVIHTGEKPYECCECGKAFSQSSHLLRHQIIHTGEKPYECRECGKAFRQSSALTQHQKIHTGKRPYECRECGKDFSRSSSLRKHERIHTGERPYQCKECGKSFNQSSGLSQHRKIHTLKKPHECDLCGKAFCHRSHLIRHQRIHTGKKPYKCDECGKAFSQSSNLIEHRKTHTGEKPYKCQKCGKAFSQSSSLIEHQRIHTGEKPYECCQCGKAFCHSSALIQHQRIHTGKKPYTCECGKAFRHRSALIEHYKTHTREKPYVCNLCGKSFRGSSHLIRHQKIHSGEKL

SEQ ID NO: 16360 - protein, 531 aa, Homo sapiens
MGFLHVGQDGLELPTSGDPPASASQSAGITGVSHRTQPPCFEGLTSKDLVREEKTRKRKRKAKESGMALLQGLLTFRDVAIEFSQEEWKCLDPAQRTLYRDVMLENYRNLVSLDTSSKCMMKMFSSTGQGNTEVVHTGTLQIHASHHIGDTCFQEIEKDIHDFVFQWQENETNGHEALMTKTKKLMSSTERHDQRHAGNKPIKNELGSSFHSHLPEVHIFHPEGKIGNQVEKAINDAFSVSASQRISCRPKTRISNKYRNNFLQSSLLTQKREVHTREKSFQRNESGKAFNGSSLLKKHQIIHLGDKQYKCDVCGKDFHQKRYLACHRCHTGENPYTCNECGKTFSHNSALLVHKAIHTGEKPYKCNECGKVFNQQSNLARHHRVHTGEKPYKCEECDKVFSRKSHLERHRRIHTGEKPYKCKVCDKAFRRDSHLAQHTVIHTGEKPYKCNECGKTFVQNSSLVMHKVIHTGEKRYKCNECGKVFNHKSNLACHRRLHTGEKPYKCNECGKVFNRKSNLERHHRLHTGKKS

SEQ ID NO: 16361 - protein, 129 aa, Homo sapiens
MREKSFQCNESGKAFNCSSLLKKCQIIHLGEKKYKCDICGKVFNQKRYLAYHHRCHTGEKPYKCNQCGKTFSYKSSLVIHKAIHTGEKPHKCNECGKVFNQKAYLASHHRLHTGEKPYKCEECDKVFSR

SEQ ID NO: 16362 - protein, 590 aa, Homo sapiens
MSDSPAGSNPRTPESSGSGSGGGGKRPAVPAAVSLLPPADPLRQANRLPIRVLKMLSAHTGHLLHPEYLQPLSSTPVSPIELDAKKSPLALLAQTCSQIGKPDPPPSSKLNSVAAAANGLGAEKDPGRSAPGAASAAAALKQLGDSPAEDKSSFKPYSKGSGGGDSRKDSGSSSVSSTSSSSSSSPGDKAGFRVPSAACPPFPPHGAPVSASSSSSSPGGSRGGSPHHSDCKNGGGVGGGELDKKDQEPKPSPEPAAVSRGGGGEPGAHGGAESGASGRKSEPPSALVGAGHVAPVSPYKPGHSVFPLPPSSIGYHGSIVGAYAGYPSQFVPGLDPSKSGLVGGQLSGGLGLPPGKPPSSSPLTGASPPSFLQGLCRDPYCLGGYHGASHLGGSSCSTCSAHDPAGPSLKAGGYPLVYPGHPLQPAALSSSAAQAALPGHPLYTYGFMLQNEPLPHSCNWVAASGPCDKRFATSEELLSHLRTHTALPGAEKLLAAYPGASGLGSAAAAAAAAASCHLHLPPPAAPGSPGSLSLRNPHTLGLSRYHPYGKSHLSTAGGLAVPSLPTAGPYYSPYALYGQRLASASALGYQ

SEQ ID NO: 16363 - protein, 412 aa, Homo sapiens
MTFTFQSEDLKRDCGKKMSHQHVFSLAMEEDVKTADTKKASRILDHEKENTRSICLLEQKRKVVSSNIDVPPARKSSEELDMDKVTAAMVLTSLSTSPLVRSPPVRPNESLSGSWKEGGCVPSSTSSSGYWSWSAPSDQSNPSTPSPPLSADSFKPFRSPAQPDDGIDEAEASNLLFDEPIPRKRKNSMKVMFKCLWKNCGKVLSTAAGIQKHIRTIHLGRVGDSDYSDGEEDFYYTEIKLNTDSVADGLSSLAPVSPSQSLASPPTFPIPDSSRTETPCAKTETKLMTPLSRSAPTTLYLVHTDHAYQATPPVTIPGSAKFTPNGSSFSISWQSPPVTFTGIPVSPTHHPVGTGEQRQHAHTVLSSPPRGTVSLRKPRGEGKKCRKVYGMENRDMWCTACRWKKACQRFLD

SEQ ID NO: 16364 - protein, 300 aa, Homo sapiens
MHSLKKVTFEDVAIDFTQEEWAMMDTSKRKLYRDVMLENISHLVSLGYQISKSYIILQLEQGKELWREGREFLQDQNPDRESALKKKHMISMHPITRKDASTSMTMENSLILEDPFECNDSGEDCTHSSTITQRLLTHSGKKPYVSKQCGKSLRNLFSPKPHKQIHTKGKSYQCNLCEKAYTNCFRLRRHKMTHTGERPYACHLCGKAFTQCSHLRRHEKTHTGERPYKCHQCGKAFIQSFNLRRHERTHLGKKCYECDKSGKAFSQSSGFRGNKIIHTGEKPHACLLCGKAFSLSSDLR

SEQ ID NO: 16365 - protein, 300 aa, Homo sapiens
MHSLEKVTFEDVAIDFTQEEWDMMDTSKRKLYRDVMLENISHLVSLGYQISKSYIILQLEQGKELWREGRVFLQDQNPDRESALKKKHMISMHPIIRKDASTSMTMENSLILEDPFEYNDSGEDCTHSSTITQCLLTHSGKKPCVSKQCGKSLRNLLSPKPRKQIHTKGKSYQCNLCEKAYTNCFYLRRHKMTHTGERPYACHLCGKAFTQCSHLRRHEKTHTGERPYKCHQCGKAFIQSFNLRRHERTHLGQKCYECDKSGKAFSQSSGFRGNKIIHIGEKPHACLLCGKAFSLSSDLR

SEQ ID NO: 16366 - protein, 300 aa, Homo sapiens
MHSLKKVTFEDVAIDFTQEEWAMMDTSKRKLYRDVMLENISHLVSLGYQISKSYIILQLEQGKELWQEGREFLQDQNPDRESALKKTHMISMHPIIRKDAPTSMTMENSLILEDPFECNDSGEDCTHSSTIIQCLLTHSGKKPYVSKQCGKSLSNLLSPKPHKQIHTKGKSYQCNLCEKAYTNCFHLRRPKMTHTGERPYTCHLCRKAFTQCSHLRRHEKTHTGERPYKCHQCGKAFIQSFNLRRHERTHLGEKWYECDNSGKAFSQSSGFRGNKIIHTGEKPHACLLCGKAFSLSSDLR

SEQ ID NO: 16367 - protein, 300 aa, Homo sapiens
MHSLKKLTFEDVAIDFTQEEWAMMDTSKRKLYRDVMLENISHLVSLGYQISKSYIILQLEQGKELWREGRVFLQDQNPNRESALKKTHMISMHPITRKDASTSMTMENSLILEDPFECNDSGEDCTRSSTITQCLLTHSGKKPYVSKQCGKSLRNLLSTEPHKQIHTKGKSYQCNLCEKAYTNCFHLRRHKMTHTGERPYACHLCRKAFTQCSHLRRHEKTHTGQRPYKCHQYGKVFIQSFNLQRHERTHLGKKCYECDKSGKAFSQSSGFRGNKIIHTGEKPHACLLCGKAFSLSSNLR

SEQ ID NO: 16368 - protein, 76 aa, Homo sapiens
MARGQQKIQSQQKNAKKQAGQKKKQGHDQKAAAKAALIYTCTVCRTQMPDPKTFKQHFESKHPKTPLPPELADVQA

SEQ ID NO: 16369 - protein, 371 aa, Homo sapiens
MDMAQEPVTFRDVAIYFSREEWACLEPSQRALYRDVMLDNFSSVAALGFCSPRPDLVSRLEQWEEPWVEDRERPEFQAVQRGPRPGARKSADPKRPCDHPAWAHKKTHVRRERAREGSSFRKGFRLDTDDGQLPRAAPERTDAKPTAFPCQVLTQRCGRRPGRRERRKQRAVELSFICGTCGKALSCHSRLLAHQTVHTGTKAFECPECGQTFRWASNLQRHQKNHTREKPFCCEACGQAFSLKDRLAQHRKVHTEHRPYSCGDCGKAFKQKSNLLRHQLVHTGERPFYCADCGKAFRTKENLSHHQRVHSGEKPYTCAECGKSFRWPKGFSIHRRLHLTKRFYECGHCGKGFRHLGFFTRHQRTHRHGEV

SEQ ID NO: 16370 - protein, 499 aa, Homo sapiens
MKRHEMAAKPPAMCSHFAKDLRPEQYIKNSFQQVILRRYGKCGYQKGCKSVDEHKLHKGGHKGLNRCVTTTQSKIVQCDKYVKVFHKYSNAKRHKIRHTGKNPFKCKECGKSFCMLSQLTQHEIIHTGEKPYKCEECGKAFKKSSNLTNHKIIHTGEKPYKCEECGKAFNQSSTLTRHKIIHTGEKLYKCEECGKAFNRSSNLTKHKIVHTGEKPYKCEECGKAFKQSSNLTNHKKIHTGEKPYKCGECGKAFTLSSHLTTHKRIHTGEKPYKCEECGKAFSVFSTLTKHKIIHTEEKPYKCEECGKAFNRSSHLTNHKVIHTGEKPYKCEECGKAFTKSSTLTYHKVIHTGKKPYKCEECGKAFSIFSILTKHKVIHTEDKPYKCEECGKTFNYSSNFTNHKKIHTGEKPYKCEECGKSFILSSHLTTHKIIHTGEKPYKCKECGKAFNQSSTLMKHKIIHTGEKPYKCEECGKAFNQSPNLTKHKRIHTKEKPYKCK

SEQ ID NO: 16371 - protein, 641 aa, Homo sapiens
MDSVVFEDVAVNFTQEEWALLGPSQKKLYRDVMQETFVNLASIGENWEEKNIEDHKNQGRKLRSHMVERLCERKEGSQFGETISQTPNPKPNKKTFTRVKPYECSVCGKDYMCHSSLNRHMRSHTEHRSYEYHKYGEKSYECKECGKRFSFRSSFRIHERTHTGEKPYKCKQCGKAFSWPSSFQIHERTHTGEKPYECKECGKAFIYHTTFRGHMRMHTGEKPYKCKECGKTFSHPSSFRNHERTHSGEKPYECKQCGKAFRYYQTFQIHERTHTGEKPYQCKQCGKALSCPTSFRSHERIHTGEKPYKCKKCGKAFSFPSSFRKHERIHTGEKPYDCKECGKAFISLPSYRRHMIMHTGNGPYKCKECGKAFDCPSSFQIHERTHTGEKPYECKQCGKAFSCSSSFRMHERTHTGEKPHECKQCGKAFSCSSSVRIHERTHTGEKPYECKQCGKAFSCSSSFRMHERIHTGEKPYECKQCGKAFSFSSSFRMHERTHTGEKPYECKQCGKAFSCSSSFRMHERTHTGEKPYECKQCGKAFSCSSSIRIHERTHTGEKPYECKQCGKAFSCSSSVRMHERTHTGVKPYECKQCDKAFSCSRSFRIHERTHTGEKPYACQQCGKAFKCSRSFRIHERVHSGE

SEQ ID NO: 16372 - protein, 489 aa, Homo sapiens
MKELDPKNDISEDKLSVVGEATGGPTRNGARGPGSEGVWEPGSWPERPRGDAGAEWEPLGIPQGNKLLGGSVPACHELKAFANQGCVLVPPRLDDPTEKGACPPVRRGKNFSSTSDLSKPPMPCEEKKTYDCSECGKAFSRSSSLIKHQRIHTGEKPFECDTCGKHFIERSSLTIHQRVHTGEKPYACGDCGKAFSQRMNLTVHQRTHTGEKPYVCDVCGKAFRKTSSLTQHERIHTGEKPYACGDCGKAFSQNMHLIVHQRTHTGEKPYVCPECGRAFSQNMHLTEHQRTHTGEKPYACKECGKAFNKSSSLTLHQRNHTGEKPYVCGECGKAFSQSSYLIQHQRFHIGVKPFECSECGKAFSKNSSLTQHQRIHTGEKPYECYICKKHFTGRSSLIVHQIVHTGEKPYVCGECGKAFSQSAYLIEHQRIHTGEKPYRCGQCGKSFIKNSSLTVHQRIHTGEKPYRCGECGKTFSRNTNLTRHLRIHT

SEQ ID NO: 16373 - protein, 664 aa, Homo sapiens
MEGFMDSGTQTDAVVVLSLAQAAVLGLVSENELFGATISAEAFYPDLGPELSGAAMGEPEPPGPDVYQLACNGRALEEPAEEEVLEVEAACEKHTRRKTRPPVRLVPKVKFEKVEEEEQEVYEVSVPGDDKDAGPAEAPAEAASGGCDALVQSSAVKMIDLSAFSRKPRTLRHLPRTPRPELNVAPYDPHFPAPARDGFPEPSMALPGPEALPTECGFEPPHLAPLSDPEAPSMESPEPVKPEQGFVWQEASEFEADTAGSTVERHKKAQLDRLDINVQIDDSYLVEAGDRQKRWQCRMCEKSYTSKYNLVTHILGHNGIKPHSCPHCSKLFKQPSHLQTHLLTHQGTRPHKCQVCHKAFTQTSHLKRHMLLHSEVKPYSCHFCGRGFAYPSELKAHEVKHESGRCHVCVECGLDFSTLTQLKRHLASHQGPTLYQCLECDKSFHYRSQLQNHMLKHQNVRPFVCTECGMEFSQIHHLKQHSLTHKGVKEFKCEVCGREFTLQANMKRHMLIHTSVRPYQCHICFKTFVQKQTLKTHMIVHSPVKPFKCKVCGKSFNRMYNLLGHMHLHAGSKPFKCPYCSSKFNLKGNLSRHMKVKHGVMDIGLDSQDPMMELTGTDPSELDGQQEMEDFEENAYSYASVDSSAEASVLTEQAMKEMAYYNVL

SEQ ID NO: 16374 - protein, 761 aa, Homo sapiens
MDSGGGSLGLHTPDSRMAHTMIMQDFVAGMAGTAHIDGDHIVVSVPEAVLVSDVVTDDGITLDHGLAAEVVHGPDIITETDVVTEGVIVPEAVLEADVAIEEDLEEDDGDHILTSELITETVRVPEQVFVADLVTGPNGHLEHVVQDCVSGVDSPTMVSEEVLVTNSDTETVIQAAGGVPGSTVTIKTEDDDDDDVKSTSEDYLMISLDDVGEKLEHMGNTPLKIGSDGSQEDAKEDGFGSEVIKVYIFKAEAEDDVEIGGTEIVTESEYTSGHSVAGVLDQSRMQREKMVYMAVKDSSQEEDDIRDERRVSRRYEDCQASGNTLDSALESRSSTAAQYLQICDGINTNKVLKQKAKKRRRGETRQWQTAVIIGPDGQPLTVYPCHICTKKFKSRGFLKRHMKNHPDHLMRKKYQCTDCDFTTNKKVSFHNHLESHKLINKVDKTHEFTEYTRRYREASPLSSNKLILRDKEPKMHKCKYCDYETAEQGLLNRHLLAVHSKNFPHVCVECGKGFRHPSELKKHMRTHTGEKPYQCQYCIFRCADQSNLKTHIKSKHGNNLPYKCEHCPQAFGDERELQRHLDLFQGHKTHQCPHCDHKSTNSSDLKRHIISVHTKDFPHKCEVCDKGFHRPSELKKHSDIHKGRKIHQCRHCDFKTSDPFILSGHILSVHTKDQPLKCKRCKRGFRQQNELKKHMKTHTGRKIYQCEYCEYSTTDASGFKRHVISIHTKDYPHRCEFCKKGFRRPSEKNQHIMRHHKEALM

SEQ ID NO: 16375 - protein, 430 aa, Homo sapiens
MEEEEMNDGSQMVRSQESLTFQDVAVDFTREEWDQLYPAQKNLYRDVMLENYRNLVALGYQLCKPEVIAQLELEEEWVIERDSLLDTHPDGENRPEIKKSTTSQNISDENQTHEMIMERLAGDSFWYSILGGLWDFDYHPEFNQENHKRYLGQVTLTHKKITQERSLECNKFAENCNLNSNLMQQRIPSIKIPLNSDTQGNSIKHNSDLIYYQGNYVRETPYEYSECGKIFNQHILLTDHIHTAEKPSECGKAFSHTSSLSQPQMLLTGEKPYKCDECGKRFSQRIHLIQHQRIHTGEKPFICNGCGKAFRQHSSFTQHLRIHTGEKPYKCNQCGKAFSRITSLTEHHRLHTGEKPYECGFCGKAFSQRTHLNQHERTHTGEKPYKCNECGKAFSQSAHLNQHRKIHTREKLCEYKCEQTVRHSPSFSST

SEQ ID NO: 16376 - protein, 554 aa, Homo sapiens
MNVMLENYKNLVFLAGIAVSKQDPITSLEQEKEPWNMKICEMVDESPAMCSSFTRDLWPEQDIKDSFQQVILRRHGKCEHENLQLRKGSANVVECKVYKKGYELNQCLTTTQSKIFPCDKYIKVFHKIFNSNRHKTRHTGEKPFKCKKCDESFCMLLHLHQHKRIHIRENSYQCEECDKVFKRFSTLTRHKRVHTGEKPFKCEECGKAFKHSSTLTTHKMIHTGEKPYRCEECGKAFYHSSHLTTHKVIHTGEKPFKCEECGKAFNHPSALTTHKFIHVKEKPYKCEECDKAFNRFSYLTKHKIIHSGEKSYKCEQCGKGFNWSSTLTKHKRIHTGEKPYKCEECGKAFNVSSHLTTHKMIHTGEKPYKCEECGKAFNHSSKLTIHKIIHTGEKPYKCEECGKAFNQSSNLTKHKIIHTGEKLYKCEECGKAFNRSSNLTTHKRIHTGEKPYKCEECGKAFNRSSNLTKHNIIHTGEKSYKCEECGKAFNQSSTLTKHRKIQQGMVAHACNPNTLRGLGEQIARSGVQDQPGQHGKTPSLLKIQKFAGCGGRRL

SEQ ID NO: 16377 - protein, 495 aa, Homo sapiens
MAKRPGPPGSREMGLLTFRDIAIEFSLAEWQCLDHAQQNLYRDVMLENYRNLVSLGIAVSKPDLITCLEQNKEPQNIKRNEMVAKHPVTCSHFTQDLQSEQGIKDSLQKVILRRYGKCGQEDLQVKKCCKSVGECEVHKGGYNYVNQCLSATQNKTFQTHKCVKVFGKFSNSNRHKTRHTGKKHFKCKNDGKSFCMLSRLNQHQIIHTREKSYKCEECGKSFNCSSTLTRHKRIHTGEKPYRCEECGKAFSWSASLTKHKRIHTGEKPYTCEERGKVFSRSTLTNYKRIHTGEKPYTCEECGKAFSRSSTLTNHKRIHTGERPYKCEECGKAFSLSSTLKKHKIVHTGEKLYTCEECGKAFTFSSTLNTHKRIHTGEKPYTCEECGKAFSLPSTFTYHKRTHTGEKPYKCEECGKAFNCSSTLKKHKIIHTGEKLYKCKECGKAFTFSSTLNTHKRIHTGEKPYKCEECDQTFKWHSSLANHKNMHTGEKPYKYE

SEQ ID NO: 16378 - protein, 904 aa, Homo sapiens
MLETYNSLVSLQELVSFEEVAVHFTWEEWQDLDDAQRTLYRDVMLETYSSLVSLGHCITKPEMIFKLEQGAEPWIVEETPNLRLSAVQIIDDLIERSHESHDRFFWQIVITNSNTSTQERVELGKTFNLNSNHVLNLIINNGNSSGMKPGQFNDCQNMLFPIKPGETQSGEKPHVCDITRRSHRHHEHLTQHHKIQTLLQTFQCNEQGKTFNTEAMFFIHKRVHIVQTFGKYNEYEKACNNSAVIVQVITQVGQPTCCRKSDFTKHQQTHTGEKPYECVECEKPSISKSDLMLQCKMPTEEKPYACNWCEKLFSYKSSLIIHQRIHTGEKPYGCNECGKTFRRKSFLTLHERTHTGDKPYKCIECGKTFHCKSLLTLHHRTHSGEKPYQCSECGKTFSQKSYLTIHHRTHTGEKPYACDHCEEAFSHKSRLTVHQRTHTGEKPYECNECGKPFINKSNLRLHQRTHTGEKPYECNECGKTFHRKSFLTIHQWTHTGEKPYECNECGKTFRCKSFLTVHQRTHAGEKPYACNECGKTYSHKSYLTVHHRTHTGEKPYECNECGKSFHCKSFLTIHQRTHAGKKPYECNECEKTFINKLNLGIHKITHTGERPYECNECGKTFRQKSNLSTHQGTHTGEKPYVCGKTFHRKSFLTIHQRTHTGKNRMDVMNVEKLFVRNHTLLYIRELTPGKSPMNVMNVENPFIRRQIFRSIKVFTRGRNPMNVANVEKPCQKSVLTVHHRTHTGEKPYECNECGKTFCHKSNLSTHQGTHSGEKPYECDECRKTFYDKTVLTIHQRTHTGEKPFECKECRKTFSQKSKLFVHHRTHTGEKPFRCNECRKTFSQKSGLSIHQRTHTGEKPYECKECGKTFCQKSHLSRHQQTHIGEKSDVAEAGYVFPQNHSFFP

SEQ ID NO: 16379 - protein, 478 aa, Homo sapiens
MELLTFKDVAIEFSPEEWKCLDTSQQNLYRDVMLENYRNLVSLGVSISNPDLVTSLEQRKEPYNLKIHETAARPPAVCSHFTQNLWTVQGIEDSFHKLIPKGHEKRGHENLRKTCKSINECKVQKGGYNRINQCLLTTQKKTIQSNICVKVFHKFSNSNKDKIRYTGDKTFKCKECGKSFHVLSRLTQHKRIHTGENPYTCEECGKAFNWSSILTKHKRIHAREKFYKCEECGKGFTRSSHLTKHKRIHTGEKPYICEKCGKAFNQSSTLNLHKRIHSAQKYYKCEECGKAFKWSSSLNEHKRIHAGEKPFSCEECGNVFTTSSDFAKHKRIHTGEKPYKCEECGKSFNRSTTLTTHKRIHTGEKPYTCEECGKAFNWSSTLNVHKRIHSGKNPYKCEDCGKAFKVFANLHNHKKIHTGEKPYICKQCGKAFKQSSHLNKHKKIHTVDKPYKCKECGKAFKQYSNLPQHKRTHTGGKF

SEQ ID NO: 16380 - protein, 126 aa, Homo sapiens
MGLLTFRDVAIEFSREEWEHLDSDQKLLYGDVMLENYGNLVSLGLAVSKPDLITFLEQRKEPWNVKSAETVAIQPDIFSHDTQGLLRKKLIEASFQKVILDGYGSCGPQNLNLRKEWESEGKIILW

SEQ ID NO: 16381 - protein, 911 aa, Homo sapiens
MCSHFTQDFLPVQGIEDSFHKLILRRYEKCGHDNLQLRKGCKSMNVCKVQKGVYNGINKCLSNTQSKIFQCNARVKVFSKFANSNKDKTRHTGEKHFKCNECGKSFQKFSDLTQHKGIHAGEKPYTCEERGKDFGWYTDLNQHKKIHTGEKPYKCEECGKAFNRSTNLTAHKRIHNREKAYTGEDRDRAFGWSTNLNEYKKIHTGDKPYKCKECGKAFMHSSHLNKHEKIHTGEKPYKCKECGKVISSSSSFAKHKRIHTGEKPFKCLECGKAFNISTTLTKHRRIHTGEKPYTCEVCGKAFRQSANLYVHRRIHTGEKPYTCGECGKTFRQSANLYVHRRIHTGEKPYKCEDCGKAFGRYTALNQHKKIHTGEKPYKCEECGKAFNSSTNLTAHKRIHTREKPYTCEDRGRAFGLSTNLNEYKKIHTGDKPYKCKECGKAFIHSLHLNKHEKIHTGKKPYKCKQCGKVITSSSSFAKHKRIHTGEKPFECLECGKAFTSSTTLTKHRRIHTGEKPYTCEVCGKAFRQSAILYVHRRIHTGEKPYTCEECGKTFRQSANLYVHRRIHTGEKPYKCEECGKAFGRYTDLNQHKKIHTGEKLYKCEECGKDFVWYTDLNQQKKIYTGEKPYKCEECGKAFAPSTDLNQHTKILTGEQSYKCEECGKAFGWSIALNQHKKIHTGEKPYKCEECGKAFSRSRNLTTHRRVHTREKPYKCEDRGRSFGWSTNLNEYKKIHTGDKLYKCKECGKVFKQSSHLNRHEKIHTGKKPYKCKECGKVITSSSSFAKHKRIHTGEKPFKCLECGKAFTSSTTLTKHRRIHTGEKPYTCEECGKAFRQSAILYVHRRIHTGEKPYTCGECGKTFRQSANLYAHKKIHTGEKPYTCGDCGKTFRQSANLYAHKKIHTGDKTIQV

SEQ ID NO: 16382 - protein, 619 aa, Homo sapiens
MGPLTFMDVAIEFSVEEWQCLDTAQQNLYRNVMLENYRNLVFLGIAVSKPDLITCLEQGKEPWNMERHEMVAKPPGMCCYFAQDLRPEQSIKASLQRIILRKYEKCGHHNLQLKKGYKSVDEYKVHKGSYNGFNQCLTTTQSKIFQCDKYVKDFHKFSNSNRHKTEKNPFKCKECGKSFCVLSHLTQHKRIHTTVNSYKLEECGKAFNVSSTLSQHKRIHTGQKHYKCEECGIAFNKSSHLNTHKIIHTGEKSYKREECGKAFNISSHLTTHKIIHTGENAYKCKECGKAFNQSSTLTRHKIIHAGEKPYICEHCGRAFNQSSNLTKHKRIHTGDKPYKCEECGKAFNVSSTLTQHKRIHTGEKPYKCEECGKAFNVSSTLTQHKRIHTGEKPYKCEECGKAFNTSSHLTTHKRIHTGEKPYKCEECGKAFNQFSQLTTHKIIHTGEKPYKCKECGKAFKRSSNLTEHRIIHTGEKPYKCEECGKAFNLSSHLTTHKKIHTGEKPYKCKECGKAFNQSSTLARHKIIHAGEKPYKCEECGKAFYQYSNLTQHKIIHTGEKPYKCEECGKAFNWSSTLTKHKVIHTGEKPYKCKECGKAFNQCSNLTTHKKIHAVEKSDK

SEQ ID NO: 16383 - protein, 738 aa, Homo sapiens
MGLLTFRDVAIEFSLEEWQCLDTAQKNLYRNVMLENYRNLAFLGIAVSKPDLIICLEKEKEPWNMKRDEMVDEPPGICPHFAQDIWPEQGVEDSFQKVILRRFEKCGHENLQLRKGCKSVDECKVHKEGYNGLNQCFTTTQGKASQCGKYLKVFYKFINLNRYKIRHTRKKPFKCKNCVKSFCMFSHKTQHKSIYTTEKSYKCKECGKTFNWSSTLTNHKKTHTEEKPYKCEEYGKAFNQSSNYTTHKVTHTGEKPYKCEECGKAFSQSSTLTIHKRIHTGEKPCKCEECGKAFSQPSALTIHKRMHIGEKPYKCEECGKAFVWSSTLTRHKRLHSGEKPYKCEECAKAFSQFGHLTTHRIIHTGEKPYKCEECGKAFIWPSTLTKHKRIHTGEKPYKCEECGKAFHRSSNLTKHKIIHTGEKPYKCEECGKAFIWSSNLTEHKKIHTREKPYKCEECSKAFSRSSALTTHKRMHTGEKPYKCEECGKAFSQSSTLTAHKIIHTGEKPYKCEECGKAFILSSTLSKHKRIHTGEKPYKCEECGKTFNQSSNLSTHKIIHTGEKPYKCEECGKAFNRSSNLSTHKIIHTGEKPYKCDECGKSFIWSSTLFKHKRIHTGEKPYKCEECGKAFNHSQILLHIRHKRMHTGEKPYKCEECGKSFNLSSTFIKHKVIHTGVKLYKCEECGKVFFWSSALTRHKKIHAGQQPYKWEKIGKAFNQSSHLTTDKITHIGEKSYKCE

SEQ ID NO: 16384 - protein, 499 aa, Homo sapiens
MRVLTFRDVAVEFSPEEWECLDSAQQRLYRDVMLENYGNLFSLGLAIFKPDLITYLEQRKEPWNARRQKTVAKHPAGSLHFTAEILLEHDINDSFQKVILRKSGSCDLNTLRLKKDYQRVGNCKGQKSSYNGIHQCLSATRSKTCQYNKCGKAFGLCSIFTEHKKIFSREKCYKCEECGKDCRLSDFTIQKRIHTADRSYKCEECGKACKKFSNLTEHNRVHTGKKPYKCEECGKTFTCSSALTKHKRNHTGDRPYKCEECHKAFRCCSDLTKHKRIHTGEKPYKCKECHKAFRCCSDLTKHKRIHTGEKPYKCNECGKAFMWISALSQHNRIHTGEKPYICEECGKAFTYSSTLISHKRIHMELRPYKCEECGKTFKWFSDLTNHKRIHTGEKPYKCEECGKSFTCSSNLIKHKRIHMEVRPYKCEECGKTFKWFPDLTNHKRIHTGEKPYKCEECGKTFTCSSSLIKHKRSHTGDRPTSAKNVAKPLGGSQTLLNIR

SEQ ID NO: 16385 - protein, 1252 aa, Homo sapiens
MPGAPGSLEMGPLTFRDVTIEFSLEEWQCLDTVQQNLYRDVMLENYRNLVFLGMAVFKPDLITCLKQGKEPWNMKRHEMVTKPPVMRSHFTQDLWPDQSTKDSFQEVILRTYARCGHKNLRLRKDCKSANEGKMHKEGYNKLNQCRTATQRKIFQCNKHMKVFHKYSNRNKVRHTKKKTFKCIKCSKSFFMLSCLIRHKRIHIRQNIYKCEERGKAFKSFSTLTKHKIIHTEDKPYKYKKCGNAFKFSSTFTKHKRIHTGETPFRCEECGKAFNQSSNLTDHKRIHTGEKTYKCEECGKAFKGSSNFNAHKVIHTAEKPYKCEDCGKTFNHFSALRKHKIIHTGKKPYKREECGKAFSQSSTLRKHEIIHTGEKPYKCEECGKAFKWSSKLTVHKVVHTGEKPYKCEECGKAFSQFSTLKKHKIIHTGKKPYKCEECGKAFNSSSTLMKHKIIHTGEKPYKCEECGKAFRQSSHLTRHKAIHTGEKPYKCEECGKAFNHFSDLRRHKIIHTGKKPYKCEECGKAFSQSSTLRNHQIIHTGEKPYKCEECGKAFKWSSKLTVHKVIHTGEKPCKCEECGKAFKHFSALRKHKVIHTREKLYKCEECGKAFNNSSILAKHKIIHTGKKPYKCEECGKAFRQSSHLTRHKAIHTGEKPYKCEECGKAFSHFSALRRHKIIHTGKKPYKCEECGKAFSHFSALRRHKIIHTGEKPYKCEECGKAFKWSSKLTVHKVIHTAEKPCKCEECGKSFKHFSALRKHKVIHTREKLYKCEECVKAFNSFSALMKHKVIHTGEKPYKCEECGKAFKWSSKLTVHKVIHTGEKPCKCEECGKAFKHFSALRKHKVIHTGKKPYKCEECGKAFSQSSSLRKHEIIHSGEKPYKCEECGKAFKWLSKLTVHKVIHTAEKPCKCEECGKAFKHFSALRKHKIIHTGKKPYKCEECGKAFNDSSTLMKHKIIHTGKKPYKCAECGKAFKQSSHLTRHKAIHTGEKPYKCEECGKDFNNSSTLKKHKLIHTREKLYKCEECVKAFNNFSALMKHKIIHTGEKPYKCEECGKAFKWSSKLTEHKVIHTGEKPCKCEECDKAFKHFSALRKHKVIHTGKKPYQCDECGKAFNNSSTLTKHKIIHTGEKPYKCEECGKAFSQSSILTKHKIIHSVEKPYKCEECGKAFNQSSHLTRHKTIHTGEKPYKCEECGKAFIQCSYLIRHKTIHTREKPTNVKKVPKLLSNPHTLLDKTIHTGEKPYKCEECAKAF

SEQ ID NO: 16386 - protein, 503 aa, Homo sapiens
MGALTFRDVAIEFSLEEWQCLDTEQQNLYRNVMLDNYRNLVFLGIAVSKPDLITCLEQEKEPWNLKTHDMVAKPPVICSHIAQDLWPEQGIKDYFQEVILRQYKKCRHENLLLRKGCKNVDEFKMHKKGYNRHNQCLTTSHSKIFQCDKYVKVFHKFSNSNRHKIRHTSKKPFKCKECGKLFCILSHLAQHKKIHTGEKSYKCEEYGKAFNESSNCTTHKRITEKKPYKCKECGKAFNWFSHFTTHKRIHTGEKPYQCEKCGKFFNQSTNLTTHKRIHTGEKPYKCEECGKAFNQSSNLTEHKKIHTKEQPYKCEKCGKAFKWSSTLTKHKRIHNGEKPYKCEECGKAFNRSSTLNRHKITHTGGKPYKYKECGKAFNQSSTLTIHKIIHTVEKFYKCEECGKAFSRISHLTTHKRIHTGEKPYKCEECGRAFNQSSTLTTHKRIHTGEKPYECEECGKAFNRSSTLTTHKIIHSGEKIYKCKECGKAFRRFSHLTRHKTIHT

SEQ ID NO: 16387 - protein, 585 aa, Homo sapiens
MELLTFRDVAIEFSPEEWKCLDPAQQNLYRDVMLENYRNLISLGVAISNPDLVIYLEQRKEPYKVKIHETVAKHPAVCSHFTQDFLPVQGIEDSFHKLILRRYEKCGHENLELRKSCKRKVQKGGYNEFNQCLSTIQSKIFQCNVHVKVFSTFSNSNQRRIRHTGEKHFKECGKSFQKFSDLTQHQGIHAGEKPYTCEECGKDFKWYLIFNEYEIIHTGEKPFTCEECGNIFTTSSNFAKHKVHTGEKSYKYEECGKAFNRSSTLTKHKRIHAEEKPFTCEECGKIITSSSNVAKHKKIHTGEKLYKCQECGKVFNRSTTLTKHNRIHTGEKPYTCEECGKAFSRSSVLNEHKRIHTGEKPYKCEQCGKAFRQSATLNKHKSIHTGEKPYTCEECGKAFSRFTTLNEHKRIHTGERPHKCEECGKAFGWSTDLNKHKIIHTGEKPYKCEECGKAFGWSAYLSKHKKIHTGEKPYRCEECGKAFLCSRALNKHKTIHTGEKPYECEECGKAFGWSTYLSKHKKIHTGEKPYRCEECGKAFRRSRVLNKYKTIHTGDKTPKCKGCGKAFKWSSYLNQHNKIYTGEKL

SEQ ID NO: 16388 - protein, 412 aa, Homo sapiens
MAKRPGPPGSREMGLLTFRDIAIEFSLAEWQCLDHAQQNLYRDVMLENYRNLFSLGMTVSKPDLIACLEQNKEPQNIKRNEMAAKHPVTCSHFNQDLQPEQSIKDSLQKVIPRTYGKCGHENLQLKKCCKRVDECEVHKGGYNDLNQCLSNTQNKIFQTHKCVKVFSKFSNSNRHNARYTGKKHLKCKKYGKSFCMFSHLNQHQIIHTKEKSYKCEECGKSFNHSSSGTTHKRILTGEKPYRCEECGKAFRWPSNLTRHKRIHTGEKPYACEECGQAFRRSSTLTNHKRIHTGERPYKCEECGKAFSVSSALIYHKRIHTGEKPYTCEECGKAFNCSSTLKTHKIIHTGEKPYTCEECGRTFNCSSTVKAHKRIHTGEKPYKCEECDKAFKWHSSLAKHKIIHTGEKPYKCK

SEQ ID NO: 16389 - protein, 536 aa, Homo sapiens
MGPLQFRDVAIEFSLEEWHCLDTAQRNLYRNVMLENYRNLVFLGIVVSKPDLITCLEQGKKPLTMKKHEMVANPSVTCSHFARDLWPEQSIKDSFQKVTLRRYENYGHDNLQFKKGCESVDECKVHKRGYNGLNQYLTTTQSKIFQCDKYVKVIHKFSNSNRHKIRHTGKKPFKCIECGKAFNQSSTLTTHKKIHTGEKPFKCEECGKAFNWSSHLTTHKRIHTGEKRYKCEDCGKAFSRFSYLTAHKIIHSGEKPYKCEECGKAFKRSSNLTTHKIIHTGEKPYKCEECGKAFKRSSILTAHKIIHSGEKPYKCEECGKAFKHPSVLTTHKRIHTGEKPYKCEECGRAFKYFSSLTTHKIIHSGEKPYKCEECGKAFNWSSHLTTHKRIHTGEKPYKCEECGEAFKYSSSLTTHKIIHTGQQPFKCEECGKAFKCFSILTTHKRIHTGEKPYKCEECGKAFNSSSHLTAHKRIHTGEKPYKCERCGKAFKRSFILTRHKRIHTGEKPYKCEECGKGFKCPSTLTTHKVIHTGEKL

SEQ ID NO: 16390 - protein, 644 aa, Homo sapiens
MEIPAPEPEKTALSSQDPALSLKENLEDISGWGLPEARSKESVSFKDVAVDFTQEEWGQLDSPQRALYRDVMLENYQNLLALGPPLHKPDVISHLERGEEPWSMQREVPRGPCPEWELKAVPSQQQGICKEEPAQEPIMERPLGGAQAWGRQAGALQRSQAAPWAPAPAMVWDVPVEEFPLRCPLFAQQRVPEGGPLLDTRKNVQATEGRTKAPARLCAGENASTPSEPEKFPQVRRQRGAGAGEGEFVCGECGKAFRQSSSLTLHRRWHSREKAYKCDECGKAFTWSTNLLEHRRIHTGEKPFFCGECGKAFSCHSSLNVHQRIHTGERPYKCSACEKAFSCSSLLSMHLRVHTGEKPYRCGECGKAFNQRTHLTRHHRIHTGEKPYQCGSCGKAFTCHSSLTVHEKIHSGDKPFKCSDCEKAFNSRSRLTLHQRTHTGEKPFKCADCGKGFSCHAYLLVHRRIHSGEKPFKCNECGKAFSSHAYLIVHRRIHTGEKPFDCSQCWKAFSCHSSLIVHQRIHTGEKPYKCSECGRAFSQNHCLIKHQKIHSGEKSFKCEKCGEMFNWSSHLTEHQRLHSEGKPLAIQFNKHLLSTYYVPGSLLGAGDAGLRDVDPIDALDVAKLLCVVPPRAGRNFSLGSKPRN

SEQ ID NO: 16391 - protein, 193 aa, Homo sapiens
MAQASLLACEGLAGVSLVPTAASKKMMLSQIASKQAENGERAGSPDVLRCSSQGHRKDSDKSRSRKDDDSLSEASHSKKTVKKVVVVEQNGSFQVKIPKNFVCEHCFGAFRSSYHLKRHILIHTGEKPFECDICDMRFIQKYHLERHKRVHSGEKPYQCERCHQCFSRTDRLLRHKRMCQGCQSKTSDGQFSL

SEQ ID NO: 16392 - protein, 644 aa, Homo sapiens
MAEAVAAPISPWTMAATIQAMERKIESQAARLLSLEGRTGMAEKKLADCEKTAVEFGNQLEGKWAVLGTLLQEYGLLQRRLENVENLLRNRNFWILRLPPGSKGESPKEWGKLEDWQKELYKHVMRGNYETLVSLDYAISKPEVLSQIEQGKEPCNWRRPGPKIPDVPVDPSPGSGPPVPAPDLLMQIKQEGELQLQEQQALGVEAWAAGQPDIGEEPWGLSQLDSGAGDISTDATSGVHSNFSTTIPPTSWQTDLPPHHPSSACSDGTLKLNTAASTEDVKIVIKTEVQEEEVVATPVHPTDLEAHGTLFGPGQATRFFPSPAQEGAWESQGSSFPSQDPVLGLREPARPERDMGELSPAVAQEETPPGDWLFGGVRWGWNFRCKPPVGLNPRTGPEGLPYSSPDNGEAILDPSQAPRPFNEPCKYPGRTKGFGHKPGLKKHPAAPPGGRPFTCATCGKSFQLQVSLSAHQRSCGAPDGSGPGTGGGGSGSGGGGGGSGGGSARDGSALRCGECGRCFTRPAHLIRHRMLHTGERPFPCTECEKRFTERSKLIDHYRTHTGVRPFTCTVCGKSFIRKDHLRKHQRNHAAGAKTPARGQPLPTPPAPPDPFKSPASKGPLASTDLVTDWTCGLSVLGPTDGGDM

SEQ ID NO: 16393 - protein, 191 aa, Homo sapiens
MTDPSLGLTVPMAPPLAPLPPRDPNGAGSEWRKPGAVSFADVAVYFSREEWGCLRPAQRALYRDVMRETYGHLGALGESPTCLPGPCASTGPAAPLGAACGVGGPGAGQAASSQRGVCVLLPQESEAASRRSSPGWRRRPNCGIRLPRIRRWRSVRQKRTQQIPETRKRKDKGKGREPWRSPTLWPPGLLG

SEQ ID NO: 16394 - protein, 778 aa, Homo sapiens
MNLTEDCMVFEDVAIYFSQEEWGILNDAQRHLHSNVMLENFALLSSVGCWHGAKDEEVPSKQCVSVRVLQVTIPKPALSTLKAQPCKMCSSILKDILHLAEHDGTHPEQGLYTCAAEHDLHQKEQIREKLTRSDEWRPSFVNHSAHVGERNFTCTQGGKDFTASSDLLQQQVLNSGWKLYRDTQDGEAFQGEQNDFNSSQGGKDFCHQHGLFEHQKTHNGERPYEFSECGELFRYNSNLIKYQQNHAGERPYEGTEYGKTFIRKSNLVQHQKIHSEGFLSKRSDPIEHQEILSRPTPYECTQCGKAFLTQAHLVGHQKTHTGEQPYECNKCGKFFMYNSKLIRHQKVHTGERRYECSECGKLFMDSFTLGRHQRVHTGERPFECSICGKFFSHRSTLNMHQRVHAGKRLYKCSECGKAFSLKHNVVQHLKIHTGERPYECTECEKAFVRKSHLVQHQKIHTDAFSKRSDLIQHKRIDIRPRPYTCSECGKAFLTQAHLVGHQKIHTGERPYECTQCAKAFVRKSHLVQHEKIHTDAFSKRSDLIQHKRIDLRPRPYVCSECGKAFLTQAHLDGHQKIQTGERRYECNECGKFFLDSYKLVIHQRIHTGEKPYKCSKCGKFFRYRCTLSRHQKVHTGERPYECSECGKFFRDSYKLIIHQRVHTGEKPYECSNCGKFLRYRSTFIKHHKVCTGEKPHECSKCRELFRTKSSLIIHQQSHTGESPFKLRECGKDFNKCNTGQRQKTHTGERSYECGESSKVFKYNSSLIKHQIIHTGKRP

SEQ ID NO: 16395 - protein, 723 aa, Homo sapiens
MSLLKERKPKKPHYIPRPPGKPFKYKCFQCPFTCNEKSHLFNHMKYGLCKNSITLVSEQDRVPKCPKSNSLDPKQTNQPDATAKPASSKSVANGLSAFDSKLQHSSAREDIKENLELQARGTHRCLGQKPALHRASPCKSPAPEAALGAQPALEGAARPSAFVPVGEHRLKGPDNAEAPETLALHNPTAKAVSFHTKSAFHTPGYPWKAGSPFLPPEFPHKISSTKGLGAISPYMHPTIPEYPPHFYTEHGLATIYSPYLLAGSSPECDAPLLSVYGTQDPRHFLPHPGPIPKHLAPSPATYDHYRFFQQYPSNLPIPYGFYRPESAFSSYGLRLPPVTGLTRDQSSHLLEEATLVYPASSPSRLNPSDPNRKHVEFESPIPEAKDSSKAGQRDTEGSKMSPRAGSAATGSPGRPSPTDFMQTSQTCEGLYDLSNKAASSALGRLYPPEQSLTAFRPVKKSTECLPAQAAETTAESPVSLNVVNGDPPAPTGSASLVSEAAPSSPDDSSGMGPLNLSKKSEINLAATHEPTYQGSPQAETASFSELQDLPLNLSVKDPCNTQAPRPAFPGRPRAAEPAAAVPQKTGTEGSEDGPSHPETKPGSLDGDGAPPTGPGEEAPDACAVDSSEEQKQTAAVALCQLAAYSPRNIRVGDGDAAAPEPACRQDTPTLSSMESQEAQCDLRPKGQKRTSLRDAGKSQQGAKKAKLQDTARVFTLRRRARVS

SEQ ID NO: 16396 - protein, 296 aa, Homo sapiens
MYFSQEEWELLDPTQKALYNDVMQENYETVISLALFVLPKPKVISCLEQGEEPWVQVSPEFKDSAGKSPTGLKLKNDTENHQPVSLSDLEIQASAGVISKKAKVKVPQKTAGKENHFDMHRVGKWHQDFPVKKRKKLSTWKQELLKLMDRHKKDCAREKPFKCQECGKTFRVSSDLIKHQRIHTEEKPYKCQQCDKRFRWSSDLNKHLTTHQGIKPYKCSWCGKSFSQNTNLHTHQRTHTGEKPFTCHECGKKFSQNSHLIKHRRTHTGEQPYTCSICRRNFSRRSSLLRHQKLHL

SEQ ID NO: 16397 - protein, 510 aa, Homo sapiens
MAMRELNADSCSSPQMGAMWETSGSVKENSSQSKKYSTKIENLGPESACRHFWSFRYHEATGPLETISQLQKLCHQWLRPEIHSKEQILEMLVLEQFLSILPKETQNWVQKHHPQNVKQALVLVEFLQREPDGTKNEVTAHELGKEAVLLGGTAVAPGFKWKPAEPQPMGVFQKEYWNTYRVLQEQLGWNTHKETQPVYERAVHDQQMLALSEQKRIKHWKMASKLILPESLSLLTFEDVAVYFSEEEWQLLNPLEKTLYNDVMQDIYETVISLGLKLKNDTGNDHPISVSTSEIQTSGCEVSKKTRMKIAQKTMGRENPGDTHSVQKWHRAFPRKKRKKPATCKQELPKLMDLHGKGPTGEKPFKCQECGKSFRVSSDLIKHHRIHTGEKPYKCQQCDRRFRWSSDLNKHFMTHQGIKPYRCSWCGKSFSHNTNLHTHQRIHTGEKPFKCDECGKRFIQNSHLIKHQRTHTGEQPYTCSLCKRNFSRRSSLLRHQKLHRRREACLVSPN

SEQ ID NO: 16398 - protein, 570 aa, Homo sapiens
MESLGLHTVTLSDGTTAYVQQAVKGEKLLEGQVIQLEDGTTAYIHQVTVQKEALSFEDGQPVQLEDGSMAYIHRTPREGYDPSTLEAVQLEDGSTAYIHHPVAVPSESTILAVQTEVGLEDLAAEDDEGFSADAVVALEQYASKVLHDSQIPRNGKGQQVGDRAFRCGYKGCGRLYTTAHHLKVHERAHTGDRPYRCDFPSCGKAFATGYGLKSHVRTHTGEKPYKCPEELCSKAFKTSGDLQKHVRTHTGERPFQCPFEGCGRSFTTSNIRKVHVRTHTGERPYTCPEPHCGRGFTSATNYKNHVRIHTGEKPYVCTVPGCGKRFTEYSSLYKHHVVHTHCKPYTCSTCGKTYRQTSTLAMHKRSAHGELEATEESEQALYEQQQLEAASAAEESPPPKRPRIAYLSEVKEERDDIPAQVAMVTEEDGAPQVALITQDGAQQVSLSPEDLQALGSAISMVTQHGSTTLTIPSPDADLATSGTHTVTMVSADGTQTQPVTIITSGAVVAEDSSVASLRHQQVALLATANGTHIAVQLEEQQTLEEAINVATAAMQQGAVTLETTVSESGC

SEQ ID NO: 16399 - protein, 746 aa, Homo sapiens
MAFSQGLLTFRDVAIEFSQEEWKCLDPAQRTLYRDVMLENYRNLVSLDISSKCTMKEFLSTAQGNREVFHAGTLQIHESHHNGDFCYQDVDKDIHDYEFQWQEDERNGHEAPMTKIKKLTGITERYDQSHARNKPIKDQLGSSFHSHLPEMHIFQTEEKIDNQVVKSVHDASLVSTAQRISCRPKTHISNNHGNNFWNSSLLTQKQEVHMREKSFQCNESGKAFNYSSLLRKHQIIHLADKYKCDVCGKLFNQKRNLACHRRCHTGENPYKCNECGKTFSQTSSLTCHRRLHTGEKPYKCEECDKAFHFKSILERHRIIHTEEKPYKCNECGKTFRQKSILTRHHRLHTGEKPYKCNECGKTFSHKSSLTCHHRLHTGEKPYKCNECGKTFSHKSSLTCHRRLHTGEKPYKCEECDKAYSFRSNFEIHRKIHTEDNAYKCNECGKTFSRTSSLTCHRRRHTGEQPYKCEECDKAFRFKSNLERHRRIHTGEKPYKCNECGKTFSRKSYLTCHHRLHTGEKAYKCNECGKTFSWKSSLTCHRRLHSGEKPYKCKECGKTFNQQLTLKRHRRLHSGENPYKCEDSDKAYSFKSNLEIHQKIHTEENPYKCNECGKTFSRTSSLTCHRRLHTGEKPYKCEECDKAFRVKSNLEGHRRIHTGEKPYKCNECGKTFSRKSYFICHHRLHTGEKPYKCNECGKNFSQKSSLICHHRLHTGEKPYKCNECGKTFSQKSNLTCHRRLHTGEKQV

SEQ ID NO: 16400 - protein, 394 aa, Homo sapiens
MDPVACEDVAVNFTQEEWALLDISQRKLYREVMLETFRNLTSIGKKWKDQNIEYEYQNPRRNFRSLIEGNVNEIKEDSHCGETFTQVPDDRLNFQEKKASPEAKSCDNFVCGEVGIGNSSFNMNIRGDIGHKAYEYQDYAPKPYKCQQPKKAFRYHPSFRTQERNHTGEKPYACKECGKTFISHSGIRRRMVMHSGDGPYKCKFCGKAVHCLRLYLIHERTHTGEKPYECKQCVKSFSYSATHRIHERTHTGEKPYECQQCGKAFHSSSSFQAHKRTHTGGKPYECKQCGKSFSWCHSFQIHERTHTGEKPCECSKCNKAFRSYRSYLRHKRSHTGEKPYQCKECRKAFTYPSSLRRHERTHSAKKPYECKQCGKALSYKFSNTPKNALWRKTL

SEQ ID NO: 16401 - protein, 408 aa, Homo sapiens
MAPPLAPLPPRDPNGAGPEWREPGAVSFADVAVYFCREEWGCLRPAQRALYRDVMRETYGHLSALGIGGNKPALISWVEEEAELWGPAAQDPEVAKCQTQTDPADSRNKKKERQREGTGALEKPDPVAAGSPGLKSPQAPSAGPPYGWEQLSKAPHRGRPSLCAHPPVPRADQRHGCYVCGKSFAWRSTLVEHVYSHTGEKPFHCTDCGKGFGHASSLSKHRAIHRGERPHRCLECGRAFTQRSALTSHLRVHTGEKPYGCADCGRRFSQSSALYQHRRVHSGETPFPCPDCGRAFAYPSDLRRHVRTHTGEKPYPCPDCGRCFRQSSEMAAHRRTHSGEKPYPCPQCGRRFGQKSAVAKHQWVHRPGAGGHRGRVAGRLSVTLTPGHGDLDPPVGFQLYPEIFQECG

SEQ ID NO: 16402 - protein, 523 aa, Homo sapiens
MALPQGLLTFRDVAIEFSQEEWKCLDPAQRTLYRDVMLENYRNLVSLDISSKCMMKEFSSTAQGNREVFHAGTSQRHESHHNGDFCFQDIDKDIHDIEFQWQEDERNGHEALMTKIKKLTGSTERYDQNYAGNKPVKYQLGFSFHSHLPELHIFHTEEKIDNQVVKSIHDASLVSTAQRISCRPETHISNDYGNNFLNSSLFTQKQEVHMREKSFQCNDSGKAYNCSSLLRKHQLIHLGEKQYKCDICGKVFNSKRYVARHRRCHTGEKPYKCNECGKTFSQTYYLTCHRRLHTGEKPYKCEECDKAFHFKSKLQIHRRIHTGEKPYKCNECGKTFSQKSYLTCHRRLHTGEKPYKCNECGKTFSRKSHFTCHHRVHTGEKPYKCNECSKTFSHKSSLTYHRRLHTEEKPYKCNECGKTFNQQLTLNICRLHSGEKPYKCEECDKAYSFKSNLEIHQKIHTEENPYKCNECGKTFSRTSSLTYHHRLHTGQKPYKCEDCDEAFSFKSNLERHRRIYTGEKLHV

SEQ ID NO: 16403 - protein, 468 aa, Homo sapiens
MAQLRRGHLTFRDVAIEFSQEEWKCLDPVQKALYRDVMLENYRNLVSLGICLPDLSIISMMKQRTEPWTVENEMKVAKNPDRWEGIKDINTGRSCAVRSKAGNKPITNQLGLTFQLPLPELEIFQGEGKIYECNQVQKFISHSSSVSPLQRIYSGVKTHIFNKHRNDFVDFPLLSQEQKAHIRRKPYECNEQGKVFRVSSSLPNHQVIHTADKPNRCHECGKTVRDKSGLAEHWRIRTGEKPYKCKECGKLFNRIAYLARHEKVHTGESPYKCNECGKVFSRITYLVRHQKIHTREKPHKCNKCGKVYSSSSYLAQHWRIHTGEKLYKCNKCGKEFSGHSSLTTHLLIHTGEKPYKCKECDKAFRHKFSLTVHQRNHNGEKPYKCHECGKVFTQVSHLARHQKIHTGEKPYKCNECGKVFTQNSHLANHQRIHTGEKPYKCHVCGKVFRHSSWFVQHQRSVHERVLTN

SEQ ID NO: 16404 - protein, 540 aa, Homo sapiens
MEREALPWGLEPQDVQSSDEMRSPEGYLRGNMSENEEEEISQQEGSGDYEVEEIPFGLEPQSPGFEPQSPEFEPQSPRFEPESPGFESRSPGLVPPSPEFAPRSPESDSQSPEFESQSPRYEPQSPGYEPRSPGYEPRSPGYESESSRYESQNTELKTQSPEFEAQSSKFQEGAEMLLNPEEKSPLNISVGVHPLDSFTQGFGEQPTGDLPIGPPFEMPTGALLSTPQFEMLQNPLGLTGALRGPGRRGGRARGGQGPRPNICGICGKSFGRGSTLIQHQRIHTGEKPYKCEVCSKAFSQSSDLIKHQRTHTGERPYKCPRCGKAFADSSYLLRHQRTHSGQKPYKCPHCGKAFGDSSYLLRHQRTHSHERPYSCTECGKCYSQNSSLRSHQRVHTGQRPFSCGICGKSFSQRSALIPHARSHAREKPFKCPECGKRFGQSSVLAIHARTHLPGRTYSCPDCGKTFNRSSTLIQHQRSHTGERPYRCAVCGKGFCRSSTLLQHHRVHSGERPYKCDDCGKAFSQSSDLIRHQRTHAAGRR

SEQ ID NO: 16405 - protein, 545 aa, Homo sapiens
MDCVIFEEVAVNFTPEEWALLDHAQRSLYRDVMLETCRNLASLDCYIYVRTSGSSSQRDVFGNGISNDEEIVKFTGSDSWSIFGENWRFDNTGDQHQIPQRHLRSQLGRLCESNEGHQCGETLSQTANLLVHKSYPTEAKPSECTKCGKAFENRQRSHTGQRPCKECGQACSCLSCQSPPMKTQTVEKPCNCQDSRTASVTYVKSLSSKKSYECQKCGKAFICPSSFRGHVNSHHGQKTHACKVCGKTFMYYSYLTRHVRTHTGEKPYECKECGKAFSCPSYFREHVRTHTGEKPYECKHCGKSFSCYSSFRDHVRTHTGEKPCQCKHCGKAFTCYSSLREHGRTHSGEKPYECKECGKAFRYPSSLRAHMRMHTGEKPYVCKQCGKAFGCPTYFRRHVKTHSGVKPYQCKECGKAYSFSSSLRIHVRTHTGEKPFECKHCGKAFSCHSSLREHVRTHSGEKPYECNQCGKAFSHAQYFQKHVRSHSGVKPYECTECGKAYSCSSSLRVHVRTHTGERPYECKQCGKTFRYLASLQAHVRTHAGA

SEQ ID NO: 16406 - protein, 691 aa, Homo sapiens
MMAENNLKMLKIQQCVVANKLPRNRPYVCNICFKHFETPSKLARHYLIHTGQKPFECDVCHKTFRQLVHLERHQLTHSLPFKCSICQRHFKNLKTFVKHQQLHNETYQNNVKQVRRLLEAKQEKSMYGVYNTFTTEERWALHPCSKSDPMYSMKRRKNIHACTICGKMFPSQSKLDRHVLIHTGQRPFKCVLCTKSFRQSTHLKIHQLTHSEERPFQCCFCQKGFKIQSKLLKHKQIHTRNKAFRALLLKKRRTESRPLPNKLNANQGGFENGEIGESEENNPLDVHSIYIVPFQCPKCEKCFESEQILNEHSCFAARSGKIPSRFKRSYNYKTIVKKILAKLKRARSKKLDNFQSEKKVFKKSFLRNCDLISGEQSSEQTQRTFVGSLGKHGTYKTIGNRKKKTLTLPFSWQNMGKNLKGILTTENILSIDNSVNKKDLSICGSSGEEFFNNCEVLQCGFSVPRENIRTRHKICPCDKCEKVFPSISKLKRHYLIHTGQRPFGCNICGKSFRQSAHLKRHEQTHNEKSPYASLCQVEFGNFNNLSNHSGNNVNYNASQQCQAPGVQKYEVSESDQMSGVKAESQDFIPGSTGQPCLPNVLLESEQSNPFCSYSEHQEKNDVFLYRCSVCAKSFRSPSKLERHYLIHAGQKPFECSVCGKTFRQAPHWKRHQLTHFKERPQGKVVALDSVM

SEQ ID NO: 16407 - protein, 317 aa, Homo sapiens
MPGEQQAEEEEEEEMQEEMVLLVKGEEDEGEEKYEVVKLKIPMDNKEVPGEAPAPSADPARPHACPDCGRAFARRSTLAKHARTHTGERPFGCTECGRRFSQKSALTKHGRTHTGERPYECPECDKRFSAASNLRQHRRRHTGEKPYACAHCGRRFAQSSNYAQHLRVHTGEKPYACPDCGRAFGGSSCLARHRRTHTGERPYACADCGTRFAQSSALAKHRRVHTGEKPHRCAVCGRRFGHRSNLAEHARTHTGERPYPCAECGRRFRLSSHFIRHRRAHMRRRLYICAGCGRDFKLPPGATAATATERCPECEGS

SEQ ID NO: 16408 - protein, 489 aa, Homo sapiens
MAAAEPMGPAQVPMNSEVIVDPIQGQVNFEDVFVYFSQEEWVLLDEAQRLLYRDVMLENFALMASLGHTSFMSHIVASLVMGSEPWVPDWVDMTLAVATETPGGSDPGCWHGMEDEEIPFEQSFSIGMSQIRIPKGGPSTQKAYPCGTCGLVLKDILHLAEHQETHPGQKPYMCVLCGKQFCFSANLHQHQKQHSGEKPFRSDKSRPFLLNNCAVQSMEMSFVTGEACKDFLASSSIFEHHAPHNEWKPHSNTKCEEASHCGKRHYKCSECGKTFSRKDSLVQHQRVHTGERPYECGECGKTFSRKPILAQHQRIHTGEMPYECGICGKVFNHSSNLIVHQRVHTGARPYKCSECGKAYSHKSTLVQHESIHTGERPYECSECGKYFGHKYRLIKHWSVHTGARPYECIACGKFFSQSSDLIAHQRVHNGEKPYVCSECGKAFSHKHVLVQHHRIHTGERPYKCSECGKAFRQRASLIRHWKIHTGERP

SEQ ID NO: 16409 - protein, 442 aa, Homo sapiens
MAAATLRDPAQQGYVTFEDVAVYFSQEEWRLLDDAQRLLYRNVMLENFTLLASLGLASSKTHEITQLESWEEPFMPAWEVVTSAILRGSWQGAKAEAAAEQSASVEVPSSNVQQHQKQHCGEKPLKRQEGRVPVLRSCRVHLSEKSLQSREVGKDLLTSSGVLKHQVTHTGEKSHRSSKSREAFHAGKRHYKCSECGKAFGQKYLLVQHQRLHTGEKPYECSECGKLFSHKSNLFIHQIVHTGERPYGCSDCGKSFSRNADLIQHQRVHTGEKPFTCSECGKAFRHNSTLVQHHRIHTGVRPYECSECGKLFSFNSSLMKHQRVHTGERPYKCSECGKFYSHKSSLINHWRVHTGERPYECSECGKFFSQSSSLMQHRKVHTGEKPFKCNECGRFFSENSSLVKHQRVHTGAKPYECRECGKFFRHSSSLVKHRRIHTGEIQ

SEQ ID NO: 16410 - protein, 483 aa, Homo sapiens
MWLGTSGKSGLPGHCLENPLQECHPAQLEEWALKGISRPSVISQPEQKEEPWVLPLQNFEARKIPRESHTDCEHQVAKLNQDNSETAEQCGTSSERTNKDLSHTLSWGGNWEQGLELEGQHGTLPGEGQLESFSQERDLNKLLDGYVGEKPMCAECGKSFNQSSYLIRHLRTHTGERPYTCIECGKGFKQSSDLVTHRRTHTGEKPYQCKGCEKKFSDSSTLIKHQRTHTGERPYECPECGKTFGRKPHLIMHQRTHTGEKPYACLECHKSFSRSSNFITHQRTHTGVKPYRCNDCGESFSQSSDLIKHQRTHTGERPFKCPECGKGFRDSSHFVAHMSTHSGERPFSCPDCHKSFSQSSHLVTHQRTHTGERPFKCENCGKGFADSSALIKHQRIHTGERPYKCGECGKSFNQSSHFITHQRIHLGDRPYRCPECGKTFNQRSHFLTHQRTHTGEKPFHCSKCNKSFRQKAHLLCHQNTHLI

SEQ ID NO: 16411 - protein, 537 aa, Homo sapiens
MESGLAGNGTGAGLVMKVKQEKPERLLQTLAPQAMLVEKDKENIFQQHRGLPPRQTMGRPRALGGQEESGSPRWAPPTEQDAGLAGRAPGSASGPLSPSLSSGEGHFVCLDCGKRFSWWSSLKIHQRTHTGEKPYLCGKCGKSFSQKPNLARHQRHHTGERPFCCPECARRFSQKQHLLKHQKTHSRPATHSCPECERCFRHQVGLRIHQRAHARDRQGSRAGLHELIQDAAARRACRLQPGPPRGRPEWAWLGLCQGWWGQPGARAAVSGPEGPGEPRQFICNECGKSFTWWSSLNIHQRIHTGERPYACPECGRRFSQKPNLTRHLRNHTGERPHPCPHCGRGFRQKQHLLKHLRTHLPGAQAAPCPSCGKSCRSRAALRAHQRAHAVAEPAVPAGEPGDQPQAEAIPGLAARPRSSQRSPGARDTLWGRGQAGLAGPGEPRQFICNECGKSFSWWSALTIHQRIHTGERPYPCPECGRRFSQKPNLTRHRRNHTGERPYLCPACGRGFSQKQHLLKHQRVHRAAPACSPKEEAR

SEQ ID NO: 16412 - protein, 518 aa, Homo sapiens
MAAAALRPPAQGTVTFEDVAVNFSQEEWSLLSEAQRCLYHDVMLENLTLISSLGCWYGAKDETPSKQTLSIQQESPLRTHWTGVCTKKVHLWGMCGPLLGDILHQGTQHNQKLNGFGAYEKKLDDDANHHQDQKQHIGEKSYRSNAKGTSFVKNCKFHMSHEPFIFHEVGKDFLSSLRLLQQEDIHTSGKSNFETKHGIPLQGGKTHYICGESTIPFSNKHSLVLHQRLLPREGPYVCSDSGKFTSKSNSFNNHQGVRTGKRPYQCGQCDESFWYKAHLTEHQRVHTGERPYECGECDKSFSHKHSLVDHQRVHTGERPYECDECGKSFSHKRSLVHHQRVHTGERPYQCGECGKSFNHKCNLIQHQRVHTGERPFECTACGKLFRSNSHLKEHQRVHTGERPYECKECRKSFRYKSHLTEHQRVHTGERPYECRECGKCFHQKGSLIQHQQIHSGERPHECGECGKCFHQKGSLIRHQQIHSGERPHECGECGKCFRQKGNLIKHQRVHTGERHHEC

SEQ ID NO: 16413 - protein, 760 aa, Homo sapiens
MENQRSSPLSFPSVPQEETLRQAPAGLPRETLFQSRVLPPKEIPSLSPTIPRQGSLPQTSSAPKQETSGRMPHVLQKGPSLLCSAASEQETSLQGPLASQEGTQYPPPAAAEQEVSLLSHSPHHQEAPVHSPEAPEKDPLTLSPTVPETDMDPLLQSPVSQKDTPFQISSAVQKEQPLPTAEITRLAVWAAVQAVERKLEAQAMRLLTLEGRTGTNEKKIADCEKTAVEFANHLESKWVVLGTLLQEYGLLQRRLENMENLLKNRNFWILRLPPGSNGEVPKVPVTFDDVAVHFSEQEWGNLSEWQKELYKNVMRGNYESLVSMDYAISKPDLMSQMERGERPTMQEQEDSEEGETPTDPSAAHDGIVIKIEVQTNDEGSESLETPEPLMGQVEEHGFQDSELGDPCGEQPDLDMQEPENTLEESTEGSSEFSELKQMLVQQRNCTEGIVIKTEEQDEEEEEEEEDELPQHLQSLGQLSGRYEASMYQTPLPGEMSPEGEESPPPLQLGNPAVKRLAPSVHGERHLSENRGASSQQQRNRRGERPFTCMECGKSFRLKINLIIHQRNHIKEGPYECAECEISFRHKQQLTLHQRIHRVRGGCVSPERGPTFNPKHALKPRPKSPSSGSGGGGPKPYKCPECDSSFSHKSSLTKHQITHTGERPYTCPECKKSFRLHISLVIHQRVHAGKHEVSFICSLCGKSFSRPSHLLRHQRTHTGERPFKCPECEKSFSEKSKLTNHCRVHSRERPPPRWSSSFCSL

SEQ ID NO: 16414 - protein, 729 aa, Homo sapiens
MAAPDLAHGGHVSRDSVCLHEEQTQAAGMVAGWLINCYQDAVTFDDVAVDFTQEEWTLLDPSQRDLYRDVMLENYENLASVEWRLKTKGPALRQDRSWFRASNETQTARSHNGGQLCDRTQCGEAFSEHSGLSTHVRTQNTGDSCVSNHYERDFFIPCQKTLFKIGEQFSVLGQCGKAFSSTPNVVSQQACTRDRSLDYSSCGEVFLNQSYLQARAGSHNGEETWKWKPCGKALTHSMGCATPVEMHAVRNPHVCRECGKAFRYTAYLTGRVQVHPGEKPCELEECGKASPVSSSLTQHVRIHAAEKPCECKECGKAFTGLSGLSKHVQTDPGQKPYECKDCGKACGGFYLLNEHGKTHTREKPFACVVCGKYFRNSSCLNNHVRIHTGIKPYTCSYCGKAFTVRCGLTRHVRTHTGEKPYTCKDCGKAFCTSSGLTEHVRTHTGEKPYECKDCGKSFTVSSSLTEHARIHTGEKPYECKQCGKAFTGRSGLTKHMRTHTGEKPYECKDCGKAYNRVYLLNEHVKTHTEEKPFICTVCRKSFRNSSCLNKHIQIHTGIKPYECKDCGKTFTVSSSLTEHIRTHTGEKPYECKVCGKAFTTSSHLIVHIRTHTGEKPYICKECGKAFASSSHLIEHRRTHTGEKPYICNECGKAFRASSHLHKHGRIHTGQKPYKCKECGKAYNRFYLLKEHLKTYTEEQVFVCKDCGKSFKNSSCLNHHTQIHTDEKPF

SEQ ID NO: 16415 - protein, 641 aa, Homo sapiens
MVHGSVTFRDVAIDFSQEEWECLQPDQRTLYRDVMLENYSHLISLGSSISKPDVITLLEQEKEPWMVVRKETSRRYPDLELKYGPEKVSPENDTSEVNLPKQVIKQISTTLGIEAFYFRNDSEYRQFEGLQGYQEGNINQKMISYEKLPTHTPHASLICNTHKPYECKECGKYFSRSANLIQHQSIHTGEKPFECKECGKAFRLHIQFTRHQKFHTGEKPFECNECGKAFSLLTLLNRHKNIHTGEKLFECKECGKSFNRSSNLVQHQSIHSGVKPYECKECGKGFNRGAHLIQHQKIHSNEKPFVCKECGMAFRYHYQLIEHCQIHTGEKPFECKECGKAFTLLTKLVRHQKIHTGEKPFECRECGKAFSLLNQLNRHKNIHTGEKPFECKECGKSFNRSSNLVQHQSIHAGIKPYECKECGKGFNRGAHLIQHQKIHSNEKPFVCRECEMAFRYHCQLIEHSRIHTGDKPFECQDCGKAFNRGSSLVQHQSIHTGEKPYECKECGKAFRLYLQLSQHQKTHTGEKPFECKECGKFFRRGSNLNQHRSIHTGKKPFECKECGKAFRLHMHLIRHQKLHTGEKPFECKECGKAFRLHMQLIRHQKLHTGEKPFECKECGKVFSLPTQLNRHKNIHTGEKAS

SEQ ID NO: 16416 - protein, 833 aa, Homo sapiens
MVHGSVTFRDVAIDFSQEEWECLQPDQRTLYRDVMLENYSHLISLGSSISKPDVITLLEQEKEPWIVVSKETSRWYPDLESKYGPEKISPENDIFEINLPKHVIKQISKTLGLEAFYFRNDSEYRSRFEGRQGHQEGYINQKIISYEEMPAYTHASPIHNTHKPYECKECGKYFSCGSNLIQHQSIHTGEKPYKCKECGKAFQLHIQLTRHQKFHTGEKTFECKECGKAFNLPTQLNRHKNIHTVKKLFECKECGKSFNRSSNLTQHQSIHAGVKPYQCKECGKAFNRGSNLIQHQKIHSNEKPFVCRECEMAFRYHYQLIEHCRIHTGEKPFECKECRKAFTLLTKLVRHQKIHMGEKPFECRECGKAFSLLNQLNRHKNIHTGEKPFECKECGKSFNRSSNLIQHQSIHADVKPYECKECGKGFNRGANLIQHQKIHSNEKPFVCRECEMAFRYHYQLIQHCQIHTGGKPFECKECGKAFSLLTQLARHKNIHTGEKPFECKDCGKAFNRGSNLVQHQSIHTGEKPYECKECGKAFRLHLQLSQHEKTHTGEKPFECKECGKFFRRGSNLNQHRSIHTGKKPFECKECGKAFRLHMHLIRHQKFHTGEKPFECKECGKAFSLHTQLNHHKNIHTGEKPFKCKECGKSFNRVSNLVQHQSIHAGVKPYECKECGKGFSRVSNLIQHQKTHSSAKPFVCKECRKTFRYHYQLTEHYRIHTGEKPFECKECGKAFGLLTQLAQHQIIHTGEKPFKCKECGKAFNRGSNLVQPQSIHTGEKPYECKECGKAFRLHLQLSLHQKLVQVRNPLNVRNVGQPSDISSNLLNIRKFILG

SEQ ID NO: 16417 - protein, 355 aa, Homo sapiens
MQRNAMYLKNVAETACNFQLTQYQISHANQKPYECQICGKPFRKRAHLTQHNRIHTGGKPYECKECGKVFICCSTLIQHKRTHTSEKPYECLECRKTFRRSAHLIRHQRIHTGEKPYKCKQCWKAFASVSDLIDIGKFTLMRDFTNVQNVGRHLTIAQLLFSIREFTLVRSPLNVRNVAKHSIIAQHLLNTRELILMRNLMNVRNVKRLLGKVHILLNIKEFILVRNHMSVSNVGRLSLVFLILIDIREFTLVKNPMNVKNVVELLTIVQLLFNTREFTLVRRLMNISSVGRFLSPVQHLFNIREHILMKNLMNVSNARRPSSIMHILFDIKEFILVRNLINVSNVGRPLLLFLI

SEQ ID NO: 16418 - protein, 699 aa, Homo sapiens
MNTFQASVSFQDVTVEFSQEEWQHMGPVERTLYRDVMLENYSHLVSVGYCFTKPELIFTLEQGEDPWLLEKEKGFLSRNSPEDSQPDEISEKSPENQGKHLLQVLFTNKLLTTEQEISGKPHNRDINIFRARMMPCKCDIAGSACQGLSLMAPHCQYSKEKAHERNVCDKWLISIKDGRTNTQEKSFAYSKIVKTLHHKEEVIQHQTIQTLGQDFEYNESRKAFLEKAALVTSNSTHPKGKSYNFNKFGENKYDKSTFIIPQNMNPEKSHYEFNDTGNCFCRITHKTLTGGKSFSQKSHIREHHRVHIGVKPFEYGKSFNRNSTLPVHQRTHATDKYSDYHPCTETFSYQSTFSVHQKVHIRAKPYEYNECGKSCSMNSHLIWPQKSHTGEKPYECPECGKAFSEKSRLRKHQRTHTGEKPYKCDGCDKAFSAKSGLRIHQRTHTGEKPFECHECGKSFNYKSILIVHQRTHTGEKPFECNECGKSFSHMSGLRNHRRTHTGERPYKCDECGKAFKLKSGLRKHHRTHTGEKPYKCNQCGKAFGQKSQLRGHHRIHTGEKPYKCNHCGEAFSQKSNLRVHHRTHTGEKPYQCEECGKTFRQKSNLRGHQRTHTGEKPYECNECGKAFSEKSVLRKHQRTHTGEKPYNCNQCGEAFSQKSNLRVHQRTHTGEKPYKCDKCGRTFSQKSSLREHQKAHPGD

SEQ ID NO: 16419 - protein, 281 aa, Homo sapiens
MAEAAPARDPETDKHTEDQSPSTPLPQPAAEKNSYLYSTEITLWTVVAAIQALEKKVDSCLTRLLTLEGRTGTAEKKLADCEKTAVEFGNQLEGKWAVLGTLLQEYGLLQRRLENVENLLRNRNFWILRLPPGSKGEAPKVPVTFDDVAVYFSELEWGKLEDWQKELYKHVMRGNYETLVSLDYAISKPDILTRIERGEEPCLDRWGQEKGNEVEVGRPRMMGTGLPPYPEHLTSPLSPAQEELKEGQAPKQQQDSEARVAPAGPEAGLALRTDLQGEAQI

SEQ ID NO: 16420 - protein, 323 aa, Homo sapiens
MAAARPEAQSRSSPTPESRSQEPLDLVLVPDDCRPGTPPSDLIEIQVVKVTDTTLVPEPPEPGSFHCALCPAAFRLVSELLFHEHGHLAGAEGGGQGGDPSRCHVCGHSCPGPASLRAHYSLHTGERPYRCALCPRAFKALAPLLRHQHRHGVEPGTSRRPPDTAAVAEQRPGVAPERAEVVMAAAAAGAAVGKPFACRFCAKPFRRSSDMRDHERVHTGERPYHCGICGKGFTQSSVLSGHARIHTGERPFRCTLCDRTFNNSSNFRKHQRTHFHGPGPGLGDSGGQLGSSAAEGSGSGCGVGDPAEEGRGETAKVKVEADQ

SEQ ID NO: 16421 - protein, 405 aa, Homo sapiens
MGPPLAPRPAHVPGEAGPRRTRESRPGAVSFADVAVYFSPEEWECLRPAQRALYRDVMRETFGHLGALGFSVPKPAFISWVEGEVEAWSPEAQDPDGESSAAFSRGQGQEAGSRDGNEEKERLKKCPKQKEVAHEVAVKEWWPSVACPEFCNPRQSPMNPWLKDTLTRRLPHSCPDCGRNFSYPSLLASHQRVHSGERPFSCGQCQARFSQRRYLLQHQFIHTGEKPYPCPDCGRRFRQRGSLAIHRRAHTGEKPYACSDCKSRFTYPYLLAIHQRKHTGEKPYSCPDCSLRFAYTSLLAIHRRIHTGEKPYPCPDCGRRFTYSSLLLSHRRIHSDSRPFPCVECGKGFKRKTALEAHRWIHRSCSERRAWQQAVVGRSEPIPVLGGKDPPVHFRHFPDIFQECG

SEQ ID NO: 16422 - protein, 782 aa, Homo sapiens
MAEPPRLPLTFEDVAIYFSEQEWQDLEAWQKELYKHVMRSNYETLVSLDDGLPKPELISWIEHGGEPFRKWRESQKSGNIICSSVDMHFDPGFEEQLFWGSQQAMNSGKTKSHFQLDPESQCSFGSFVSFRPDQGITLGSPQRHDARAPPPLACGPSESTLKEGIPGPRNLDLPGLWDVPAWESTQHPWPVCGESCWENNHLVMHQRGHSKDRTRRAWEKFNKRAETQMPWSSPRVQRHFRCGVCGKSFRRKLCLLRHLAAHTGRGPFRNADGEMCFRHELTHPSHRLPQQGEKPAQCTPCGKRSLPVDSTQARRCQHSREGPASWREGRGASSSVHSGQKPGSRLPQEGNSHQEGDTEALQHGAEGPCSCSECGERSPMSARLASPCRAHTGEKPFQCAHCTKRFRLRRLLQVHQHAHGGERPFSCRKCGKGFAKQCKLTEHIRVHSGEKPFRCAKCGRNFRQRGQLLRHQRLHTDEKPFQCPECGLSFRLESMLRAHRLRHGGERPFSCSECGRGFTHQCKLREHLRVHSGERPFQCLKCDKRFRLKGILKAHQHTHSKERPFSCGECGKGFTRQSKLTEHLRVHSGERPFQCPECNRSFRLKGQLLSHQRLHTGERPFQCPECDKRYRVKADMKAHQLLHSGEMPFSCECGKGFVKHSKLIEHIRTHTGEKPFQCPKCDKSFRLKAQLLSHQGLHTGERPFHCPECDKNFRERGHMLRHQRIHRPERPFACGDCGKGFIYKSKLAEHIRVHTKSCPAPNELDIKKRLSQLFAMIEADWS

SEQ ID NO: 16423 - protein, 382 aa, Homo sapiens
MELREEAWSPGPLDSEDQQMASHENPVDILIMDDDDVPSWPPTKLSPPQSAPPAGPPPRPRPPAPYICNECGKSFSHWSKLTRHQRTHTGERPNACADCGKTFSQSSHLVQHRRIHTGEKPYACLECGKRFSWSSNLMQHQRIHTGEKPYTCPDCGRSFTQSKSLAKHRRSHSGLKPFVCPRCGRGFSQPKSLARHLRLHPELSGPGVAAKVLAASVRRAKGPEEAVAADGEIAIPVGDGEGIIVVGAPGEGAAAAAAMAGAGAKAAGPRSRRAPAPKPYVCLECGKGFGHGAGLLAHQRAQHGDGLGAAGGEEPAHICVECGEGFVQGAALRRHKKIHAVGAPSVCSSCGQSYYRAGGEEEDDDDEAAGGRCPECRGGEGR

SEQ ID NO: 16424 - protein, 82 aa, Homo sapiens
MRNMIPQDNENPPQQGEANQNDSVAFEDVAVNFTPDEWALLDPSQKNLYREVMQETLRNLASIEVLWKRDSLKVKVISMEKF

SEQ ID NO: 16425 - protein, 425 aa, Homo sapiens
MFPPARGKELLSFEDVAMYFTREEWGHLNWGQKDLYRDVMLENYRNMVLLGFQFPKPEMICQLENWDEQWILDLPRTGNRKASGSACPGSEARHKMKKLTPKQKFSEDLESYKISVVMQESAEKLSEKLHKCKEFVDSCRLTFPTSGDEYSRGFLQNLNLIQDQNAQTRWKQGRYDEDGKPFNQRSLLLGHERILTRAKSYECSECGKVIRRKAWFDQHQRIHFLENPFECKVCGQAFRQRSALTVHKQCHLQNKPYRCHDCGKCFRQLAYLVEHKRIHTKEKPYKCSKCEKTFSQNSTLIRHQVIHSGEKRHKCLECGKAFGRHSTLLCHQQIHSKPNTHKCSECGQSFGRNVDLIQHQRIHTKEEFFQCGECGKTFSFKRNLFRHQVIHTGSQPYQCVICGKSFKWHTSFIKHQGTHKGQIST

SEQ ID NO: 16426 - protein, 498 aa, Homo sapiens
MLEEGVLPSPGPALPQEENTGEEGMAAGLLTAGPRGSTFFSSVTVAFAQERWRCLVSTPRDRFKEGIPGKSRSLVLLGLPVSQPGMNSQLEQREGAWMLEGEDLRSPSPGWKIISGSPPEQALSEASFQDPCVEMPPGDSDHGTSDLEKSFNLRPVLSPQQRVPVEARPRKCETHTESFKNSEILKPHRAKPYACNECGKAFSYCSSLSQHQKSHTGEKPYECSECGKAFSQSSSLIQHQRIHTGEKPYKCSECGRAFSQNANLTKHQRTHTGEKPYRCSECEKAFSDCSALVQHQRIHTGEKPYECSDCGKAFRHSANLTNHQRTHTGEKPYKCSECGKAFSYCAAFIQHQRIHTGEKPYRCAACGKAFSQSANLTNHQRTHTGEKPYKCSECGKAFSQSTNLIIHQKTHTGEKPYKCNECGKFFSESSALIRHHIIHTGEKPYECNECGKAFNQSSSLSQHQRIHTGVKPYECSECGKAFRCSSAFVRHQRLHAGE

SEQ ID NO: 16427 - protein, 636 aa, Homo sapiens
MAHLMMFRDVAVDFSQEEWECLDLEQRDLYRDVMLENYSNMVSLGFCIYQPEAFSLLEKGKEPWKILRDETRGPCPDMQSRCQTKKLLPKNGIFEREIAQLEIMRICKNHSLDCLCFRGDWEGNTQFQTLQDNQEECFKQVIRTCEKRPTFNQHTVFNLHQRLNTGDKLNEFKELGKAFISGSDHTQHQLIHTSEKFCGDKECGNTFLPDSEVIQYQTVHTVKKTYECKECGKSFSLRSSLTGHKRIHTGEKPFKCKDCGKAFRFHSQLSVHKRIHTGEKSYECKECGKAFSCGSDLTRHQRIHTGEKPYECNECRKAFSQRSHLIKHQRIHTGEKPYECKECGKAFTRGSHLTQHQRIHTGEKSHECKECGKAFIRGSNLAQHQNVHVGRKPYKCEKCGKAYIWSSHLARHQRIHTGRKPYECKQCGKTFTWASYLAQHEKIHNERKSYECKECGKTFLHGSEFNRHQKIHTGERNYECKECGKTFFRGSELNRHQKIHTGKRPYECEECGKAFLWGSQLTRHQRMHTGEEPYVCKECGKSFIWGSQLTRHKKIHTDAEPYGCKKSSHIFSHHSYFTEQKIHNSANLCEWTDYGNTFSHESNFAQHQNIYTFEKSYEFKDFEKAFSSSSHFISLL

SEQ ID NO: 16428 - protein, 576 aa, Homo sapiens
MDSVAFEDVSVSFSQEEWALLAPSQKKLYRDVMQETFKNLASIGEKWEDPNVEDQHKNQGRNLRSHTGERLCEGKEGSQCAENFSPNLSVTKKTAGVKPYECTICGKAFMRLSSLTRHMRSHTGYELFEKPYKCKECEKAFSYLKSFQRHERSHTGEKPYKCKQCGKTFIYHQPFQRHERTHIGEKPYECKQCGKALSCSSSLRVHERIHTGEKPYECKQCGKAFSCSSSIRVHERTHTGEKPYACKECGKAFISHTSVLTHMITHNGDRPYKCKECGKAFIFPSFLRVHERIHTGEKPYKCKQCGKAFRCSTSIQIHERIHTGEKPYKCKECGKSFSARPAFRVHVRVHTGEKPYKCKECGKAFSRISYFRIHERTHTGEKPYECKKCGKTFNYPLDLKIHKRNHTGEKPYECKECAKTFISLENFRRHMITHTGDGPYKCRDCGKVFIFPSALRTHERTHTGEKPYECKQCGKAFSCSSYIRIHKRTHTGEKPYECKECGKAFIYPTSFQGHMRMHTGEKPYKCKECGKAFSLHSSFQRHTRIHNYEKPLECKQCGKAFSVSTSLKKHMRMHNR

SEQ ID NO: 16429 - protein, 632 aa, Homo sapiens
MAAAALRDPAQGCVTFEDVTIYFSQEEWVLLDEAQRLLYCDVMLENFALIASLGLISFRSHIVSQLEMGKEPWVPDSVDMTSAMARGAYGRPGSDFCHGTEGKDLPSEHNVSVEGVAQDRSPEATLCPQKTCPCDICGLRLKDILHLAEHQTTHPRQKPFVCEAYVKGSEFSANLPRKQVQQNVHNPIRTEEGQASPVKTCRDHTSDQLSTCREGGKDFVATAGFLQCEVTPSDGEPHEATEGVVDFHIALRHNKCCESGDAFNNKSTLVQHQRIHSRERPYECSKCGIFFTYAADLTQHQKVHNRGKPYECCECGKFFSQHSSLVKHRRVHTGESPHVCGDCGKFFSRSSNLIQHKRVHTGEKPYECSDCGKFFSQRSNLIHHKRVHTGRSAHECSECGKSFNCNSSLIKHWRVHTGERPYKCNECGKFFSHIASLIQHQIVHTGERPHGCGECGKAFSRSSDLMKHQRVHTGERPYECNECGKLFSQSSSLNSHRRLHTGERPYQCSECGKFFNQSSSLNNHRRLHTGERPYECSECGKTFRQRSNLRQHLKVHKPDRPYECSECGKAFNQRPTLIRHQKIHIRERSMENVLLPCSQHTPEISSENRPYQGAVNYKLKLVHPSTHPGEVP

SEQ ID NO: 16430 - protein, 406 aa, Homo sapiens
MIEYQIPVSFKDVVVGFTQEEWHRLSPAQRALYRDVMLETYSNLVSVGYEGTKPDVILRLEQEEAPWIGEAACPGCHCWEDIWRVNIQRKRRQDMLLRPGAAISKKTLPKEKSCEYNKFGKISLLSTDLFSSIQSPSNWNPCGKNLNHNLDLIGFKRNCAKKQDECYAYGKLLQRINHGRRPNGEKPRGCSHCEKAFTQNPALMYKPAVSDSLLYKRKRVPPTEKPHVCSECGKAFCYKSEFIRHQRSHTGEKPYGCTDCGKAFSHKSTLIKHQRIHTGVRPFECFFCGKAFTQKSHRTEHQRTHTGERPFVCSECGKSFGEKSYLNVHRKMHTGERPYRCRECGKSFSQKSCLNKHWRTHTGEKPYGCNECGKAFYQKPNLSRHQKIHARKNAYRNENLIIVGNT

SEQ ID NO: 16431 - protein, 643 aa, Homo sapiens
MASVALEDVAVNFTREEWALLGPCQKNLYKDVMQETIRNLDCVGMKWKDQNIEDQYRYPRKNLRCRMLERFVESKDGTQCGETSSQIQDSIVTKNTLPGVGPYESRMSGEVIMGHSSLNCYIRVGAGHKPYEYHECGEKPDTHKQRGKAFSYHNSLQTHERLHTGKKPYNCKECGKSFSSLGNLQRHMAVQRGDGPYKCKLCGKAFFWPSLLHMHERTHTGEKPYECKQCSKAFSFYSSYLRHERTHTGEKLYECKQCSKAFPDYSSCLRHERTHTGKKPYTCKQCGKAFSASTSLRRHETTHTDEKPYACQQCGKAFHHLGSFQRHMVMHTRDGPHKCKICGKGFDCPSSLKSHERTHTGEKLYECKQCGKALSHSSSFRRHMTMHTGDGPHKCKICGKAFVYPSVFQRHEKTHTAEKPYKCKQCGKAYRISSSLRRHETTHTGEKPYKCKCGKAFIDFYSFQNHKTTHAGEKPYECKECGKAFSCFQYLSQHRRTHTGEKPYECNTCKKAFSHFGNLKVHERIHSGEKPYECKECGKAFSWLTCFLRHERIHMREKPYECQQCGKAFTHSRFLQGHEKTHTGENPYECKECGKAFASLSSLHRHKKTHWKKTHTGENPYGCKECGKAFASLSSLHRHKKTH

SEQ ID NO: 16432 - protein, 575 aa, Homo sapiens
MDPEDEGVAGVMSVGPPAARLQEPVTFRDVAVDFTQEEWGQLDPTQRILYRDVMLETFGHLLSIGPELPKPEVISQLEQGTELWVAERGTTQGCHPAWEPRSESQASRKEEGLPEEEPSHVTGREGFPTDAPYPTTLGKDRECQSQSLALKEQNNLKQLEFGLKEAPVQDQGYKTLRLRENCVLSSSPNPFPEISRGEYLYTYDSQITDSEHNSSLVSQQTGSPGKQPGENSDCHRDSSQAIPITELTKSQVQDKPYKCTDCGKSFNHNAHLTVHKRIHTGERPYMCKECGKAFSQNSSLVQHERIHTGDKPYKCAECGKSFCHSTHLTVHRRIHTGEKPYECQDCGRAFNQNSSLGRHKRTHTGEKPYTCSVCGKSFSRTTCLFLHLRTHTEERPYECNHCGKGFRHSSSLAQHQRKHAGEKPFECRQRLIFEQTPALTKHEWTEALGCDPPLSQDERTHRSDRPFKCNQCGKCFIQSSHLIRHQITHTREEQPHGRSRRREQSSSRNSHLVQHQHPNSRKSSAGGAKAGQPESRALALFDIQKIMQEKNPVHVIGVEEPSVGASMLFDIREST

SEQ ID NO: 16433 - protein, 273 aa, Homo sapiens
MSPKRDGLGTGDGLHSQVLQEQVSTGDNLHECDSQGPSKDTLVREGKTYKCKECGSVFNKNSLLVRHQQIHTGVKPYECQECGKAFPEKVDFVRPMRIHTGEKPCKCVECGKVFNRRSHLLCYRQIHTGEKPYECSECGKTFSYHSVFIQHRVTHTGEKLFGCKECGKTFYYNSSLTRHMKIHTGEKPCKCSECGKTFTYRSVFFRHSMTHTAGKPYECKECGKGFYYSYSLTRHTRSHTGEKPYECLEHRKDFGYHSAFAQQSKIHSGGKNL

SEQ ID NO: 16434 - protein, 664 aa, Homo sapiens
MPLRDKYCQTDHHHHGCCEPVYILEPGDPPLLQQPLQTSKSGIQQIIECFRSGTKQLKHILLKDVDTIFECKLCRSLFRGLPNLITHKKFYCPPSLQMDDNLPDVNDKQSQAINDLLEAIYPSVDKREYIIKLEPIETNQNAVFQYISRTDNPIEVTESSSTPEQTEVQIQETSTEQSKTVPVTDTEVETVEPPPVEIVTDEVAPTSDEQPQESQADLETSDNSDFGHQLICCLCRKEFNSRRGVRRHIRKVHKKKMEELKKYIETRKNPNQSSKGRSKNVLVPLSRSCPVCCKSFATKANVRRHFDEVHRGLRRDSITPDIATKPGQPLFLDSISPKKSFKTRKQKSSSKAEYNLTACKCLLCKRKYSSQIMLKRHMQIVHKITLSGTNSKREKGPNNTANSSEIKVKVEPADSVESSPPSITHSPQNELKGTNHSNEKKNTPAAQKNKVKQDSESPKSTSPSAAGGQQKTRKPKLSAGFDFKQLYCKLCKRQFTSKQNLTKHIELHTDGNNIYVKFYKCPLCTYETRRKRDVIRHITVVHKKSSRYLGKITASLEIRAIKKPIDFVLNKVAKRGPSRDEAKHSDSKHDGTSNSPSKKYEVADVGIEVKVTKNFSLHRCNKCGKAFAKKTYLEHHKKTHKANASNSPEGNKTKGRSTRSKALV

SEQ ID NO: 16435 - protein, 1209 aa, Homo sapiens
MECYYIVISSTHLSNGHFRNIKGVFRGPLSKNGNKTLDYAEKENTIAKALEDLKANFYCELCDKQYYKHQEFDNHINSYDHAHKQRLKELKQREFARNVASKSRKDERKQEKALQRLHKLAELRKETVCAPGSGPMFKSTTVTVRENCNEISQRVVVDSVNNQQDFKYTLIHSEENTKDATTVAEDPESANNYTAKNNQVGDQAQGIHRHKIGFSFAFPKKASVKLESSAAAFSEYSDDASVGKGFSRKSRFVPSACHLQQSSPTDVLLSSEEKTNSFHPPEAMCRDKETVQTQEIKEVSSEKDALLLPSFCKFQLQLSSDADNCQNSVPLADQIPLESVVINEDIPVSGNSFELLGNKSTVLDMSNDCISVQATTEENVKHNEASTTEVENKNGPETLAPSNTEEVNITIHKKTNFCKRQCEPFVPVLNKHRSTVLQWPSEMLVYTTTKPSISYSCNPLCFDFKSTKVNNNLDKNKPDLKDLCSQQKQEDICMGPLSDYKDVSTEGLTDYEIGSSKNKCSQVTPLLADDILSSSCDSGKNENTGQRYKNISCKIRETEKYNFTKSQIKQDTLDEKYNKIRLKETHEYWFHKSRRKKKRKKLCQHHHMEKTKESETRCKMEAENSYTENAGKYLLEPISEKQYLAAEQLLDSHQLLDKRPKSESISLSDNEEMCKTWNTEYNTYDTISSKNHCKKNTILLNGQSNATMIHSGKHNLTYSRTYCCWKTKMSSCSQDHRSLVLQNDMKHMSQNQAVKRGYNSVMNESERFYRKRRQHSHSYSSDESLNRQNHLPEEFLRPPSTSVAPCKPKKKRRRKRGRFHPGFETLELKENTDYPVKDNSSLNPLDRLISEDKKEKMKPQEVAKIERNSEQTNQLRNKLSFHPNNLLPSETNGETEHLEMETTSGELSDVSNDPTTSVCVASAPTKEAIDNTLLEHKERSENINLNEKQIPFQVPNIERNFRQSQPKSYLCHYELAEALPQGKMNETPTEWLRYNSGILNTQPPLPFKEAHVSGHTFVTAEQILAPLALPEQALLIPLENHDKFKNVPCEVYQHILQPNMLANKVKFTFPPAALPPPSTPLQPLPLQQSLCSTSVTTIHHTVLQQHAAAAAAAAAAAAAGTFKVLQPHQQFLSQIPALTRTSLPQLSVGPVGPRLCPGNQPTFVAPPQMPIIPASVLHPSHLAFPSLPHALFPSLLSPHPTVIPLQPLF

SEQ ID NO: 16436 - protein, 1349 aa, Homo sapiens
MACYLVISSRHLSNGHYRGIKGVFRGPLCKNGSPSPDFAEKKSTAKALEDVKANFYCELCDKQYHKHQEFDNHINSYDHAHKQRLKELKQREFARNVASKSWKDEKKQEKALKRLHQLAELRQQSECVSGNGPAYKAPRVAIEKQLQQGIFPIKNGRKVSCMKSALLLKGKNLPRIISDKQRSTMPNRHQLQSDRRCLFGNQVLQTSSDLSNANHRTGVSFTFSKKVHLKLESSASVFSENTEETHDCNKSPIYKTKQTADKCKCCRFANKDTHLTKEKEVNISPSHLESVLHNTISINSKILQDKHDSIDETLEDSIGIHASFSKSNIHLSDVDFTPTSREKETRNTLKNTLENCVNHPCQANASFSPPNIYNHSDARISECLDEFSSLEPSEQKSTVHLNPNSRIENREKSLDKTERVSKNVQRLVKEACTHNVASKPLPFLHVQSKDGHTTLQWPTELLLFTKTEPCISYGCNPLYFDFKLSRNTKEDHNLEDLKTELGKKPLELKTKRESQVSGLTEDQQKLIQEDYQYPKPKTMIANPDWEKFQRKYNLDYSDSEPNKSEYTFSANDLEMKNPKVPLYLNTSLKDCAGKNNSSENKLKEASRAHWQGCRKAVLNDIDEDLSFPSYISRFKKHKLIPCSPHLEFEDERQFNCKSSPCTVGGHSDHGKDFSVILKSNHISMTSKVSGCGNQRYKRYSPQSCLSRYSSSLDTSPSSMSSLRSTCSSHRFNGNSRGNLLCFHKREHHSVERHKRKCLKHNCFYLSDDITKSSQMQSEPQKERNCKLWESFKNEKYSKRRYCHCRERQKLGKNQQQFSGLKSTRIIYCDSNSQISCTGSSKKPPNCQGTQHDRLDSYSIEKMYYLNKSKRNQESLGSPHICDLGKVRPMKCNSGNISCLLKNCSSGPSETTESNTAEGERTPLTAKILLERVQAKKCQEQSSNVEISSNSCKSELEAPSQVPCTIQLAPSGCNRQALPLSEKIQYASESRNDQDSAIPRTTEKDKSKSSHTNNFTILADTDCDNHLSKGIIHLVTESQSLNIKRDATTKEQSKPLISEIQPFIQSCDPVPNEFPGAFPSNKYTGVTDSTETQEDQINLDLQDVSMHINHVEGNINSYYDRTMQKPDKVEDGLEMCHKSISPPLIQQPITFSPDEIDKYKILQLQAQQHMQKQLLSKHLRVLPAAGPTAFSPASTVQTVPVHQHTSITTIHHTFLQHFAVSASLSSHSSHLPIAHLHPLSQAHFSPISFSTLTPTIIPAHPTFLAGHPLHLVAATPFHPSHITLQPLPPTAFIPTLFGPHLNPATTSIIHLNPLIQPVFQGQDFCHHSCSSQMQQLNEVKEALNVSTHLN

SEQ ID NO: 16437 - protein, 627 aa, Homo sapiens
MAMALTDPAQVSVTFDDVAVTFTQEEWGQLDLAQRTLYQEVMLENCGLLVSLGCPVPRPELIYHLEHGQEPWTRKEDLSQGTCPGDKGKPKSTEPTTCELALSEGISFWGQLTQGASGDSQLGQPKDQDGFSEMQGERLRPGLDSQKEKLPGKMSPKHDGLGTADSVCSRIIQDRVSLGDDVHDCDSHGSGKNPVIQEEENIFKCNECEKVFNKKRLLARHERIHSGVKPYECTECGKTFSKSTYLLQHHMVHTGEKPYKCMECGKAFNRKSHLTQHQRIHSGEKPYKCSECGKAFTHRSTFVLHNRSHTGEKPFVCKECGKAFRDRPGFIRHYIIHSGENPYECFECGKVFKHRSYLMWHQQTHTGEKPYECSECGKAFCESAALIHHYVIHTGEKPFECLECGKAFNHRSYLKRHQRIHTGEKPYVCSECGKAFTHCSTFILHKRAHTGEKPFECKECGKAFSNRADLIRHFSIHTGEKPYECMECGKAFNRRSGLTRHQRIHSGEKPYECIECGKTFCWSTNLIRHSIIHTGEKPYECSECGKAFSRSSSLTQHQRMHTGRNPISVTDVGRPFTSGQTSVNIQELLLGKNFLNVTTEENLLQEEASYMASDRTYQRETPQVSSL

SEQ ID NO: 16438 - protein, 589 aa, Homo sapiens
MIKFQERVTFKDIAVIFTKEELAVLDKAQINLYQDVMLENFRNFISVDGIKNNILNLQGKGLIYLSQEELHCWKIWKQRIRDLSVSQDYIMNLQEQCSPHLEDVSLCEEWAGMSLQISENENYVVNAIIKNQDITAWQSLTQVLTPESWRKANIMTEPQKSQGRYKGIYVEEKLYRHARHDESLNWTSRDHHESQECKGEDPGRHPNCGKNLGMKSTVEQHHAVHVLPQPFTCNNCGVAFADDTDPRVHHSTHLGEKSYKCDQYGKNLSQSQYLIVHCKTHSGETPYEFHEWPTGCKQSSDLPRCQKVPSGDNPYKCKECGKGFRCNSSLHNHHRVHTGEMPYKCHVCGKAFGFRSLPCIHQGVHTGKKPYKCEDCGKGFEQSSNLLIHQRVHTGEKPYKSSECGKCFSSSSVLQVHWRFHTGEKPYRCGECGKGFSQSTHLHIHQRVHTGEKQYNAMCVERILGIVLFFTLIREFTLQKNHINAKCVESALVTVHIFTSIKAITQERNHINVMSVVKASVGIQIFNVHLRVHRGQRPCKCKACGKGFSRNSHLLAQQRVRIDKTQYTHCEHGKDLLTHQRLHEQRETL

SEQ ID NO: 16439 - protein, 903 aa, Homo sapiens
MLREEAAQKRKGKESGMALPQGRLTFRDVAIEFSLAEWKFLNPAQRALYREVMLENYRNLEAVDISSKHMMKEVLSTGQGNREVIHTGTLQRHQSYHIGDFCFQEIEKEIHNIEFQCQEDERNGHEAPTTKIKKLTGSTDQHDHRHAGNKPIKDQLGSSFYSHLPELHIFQIKGEIANQLEKSTSDASSVSTSQRISCRPQIHISNNYGNNPLNSSLLPQKQEVHMREKSFPCNESGKAFNCSSLLRKHQIPHLGDKQYKCDVCGKLFNHKQYLACHRRCHTGEKPYKCKECGKSFSYKSSLTCHHRLHTGVKPYKCNECGKVFRQNSALVIHKAIHTGEKPYKCNECGKAFNQQSHLSRHQRLHTGVKPYKCKICEKAFACHSYLANHTRIHSGEKTYKCNECGKAFNHQSSLARHHILHTGEKPYKCEECDKVFSQKSTLERHKRIHTGEKPYKCKVCDTAFTCNSQLARHRRIHTGEKTYKCNECRKTFSRRSSLLCHRRLHSGEKPYKCNQCGNTFRHRASLVYHRRLHTLEKSYKCTVCNKVFMRNSVLAVHTRIHTAKKPYKCNECGKAFNQQSHLSRHRRLHTGEKPYKCEACDKVFGQKSALESHKRIHTGEKPYRCQVCDTAFTWNSQLARHTRIHTGEKTYKCNECGKTFSYKSSLVWHRRLHGGEKSYKCKVCDKAFVCRSYVAKHTRIHSGMKPYKCNECSKTFSNRSSLVCHRRIHSGEKPYKCSECSKTFSQKATLLCHRRLHSGEKPYKCNDCGNTFRHWSSLVYHRRLHTGEKSYKCTVCDKAFVRNSYLARHIRIHTAEKPYKCNECGKAFNEQSHLSRHHRIHTGEKPYKCEACDKVFSRKSHLKRHRIIHTGEKPYKCNECGKAFSDRSTLIHHQAIHGIGKFD

SEQ ID NO: 16440 - protein, 661 aa, Homo sapiens
MPANEDAPQPGEHGSACEVSVSFEDVTVDFSREEWQQLDSTQRRLYQDVMLENYSHLLSVGFEVPKPEVIFKLEQGEGPWTLEGEAPHQSCSDGKFGIKPSQRRISGKSTFHSEMEGEDTRDDSLYSILEELWQDAEQIKRCQEKHNKLLSRTTFLNKKILNTEWDYEYKDFGKFVHPSPNLILSQKRPHKRDSFGKSFKHNLDLHIHNKSNAAKNLDKTIGHGQVFTQNSSYSHHENTHTGVKFCERNQCGKVLSLKHSLSQNVKFPIGEKANTCTEFGKIFTQRSHFFAPQKIHTVEKPHELSKCVNVFTQKPLLSIYLRVHRDEKLYICTKCGKAFIQNSELIMHEKTHTREKPYKCNECGKSFFQVSSLLRHQTTHTGEKLFECSECGKGFSLNSALNIHQKIHTGERHHKCSECGKAFTQKSTLRMHQRIHTGERSYICTQCGQAFIQKAHLIAHQRIHTGEKPYECSDCGKSFPSKSQLQMHKRIHTGEKPYICTECGKAFTNRSNLNTHQKSHTGEKSYICAECGKAFTDRSNFNKHQTIHTGEKPYVCADCGRAFIQKSELITHQRIHTTEKPYKCPDCEKSFSKKPHLKVHQRIHTGEKPYICAECGKAFTDRSNFNKHQTIHTGDKPYKCSDCGKGFTQKSVLSMHRNIHT

SEQ ID NO: 16441 - protein, 617 aa, Homo sapiens
MALPQGLLTFRDVAIEFSQEEWKCLDPAQRTLYRDVMLENYRNLVSLDISSKCMMKEFSSTAQGNREVIHTGTLQRHESHHTGDFRFQEIDKDIHNLEFQWQEDERNSHEAPMTEIKKLTGSADRYDQRHAGNKPIKDQLGSSFHSHLPELHMFQTQGKIGNQVEKSINDASSISTSQRISCRPKTHISNNYGNNFRNSSLLTQKQEVHMREKSFQCNESGKAFNYSSLLRKHQIIHLGEKQYKCDVCGKVFNRKRNLVCHRRCHTGEKPYRCNECGKTFSQTYSLTCHRRLHTGEKPYKCEECDKAFSFKSNLKRHRRIHAGEKPYKCNECGKTFSQTSSLTCHRRLHTGEKPFKCNECGKTFSRKSSLTCHHRLHTGEKPYKCNECGKTFSQELTLKCHRRLHTGEKPYKCNECGKVFNKKANLARHHRLHSGEKPYKCTECVKTFSRNSALVIHKAIHIGEKRYKCNECGKTFSRISALVIHTAIHTGEKPYKCNECGKGFNRKTHLACHHRLHTGEKPYKCNECGKVFNRKTHLAHHHRLHTGDKPYKCNECGKVFNQKAHLARHHRLHTGEKPYKCNECGKVFNQKANLARHHRLHTGEKPYKFNECGKAFN

SEQ ID NO: 16442 - protein, 855 aa, Homo sapiens
MAAAATLRLSAQGTVTFEDVAVNFTWEEWNLLSEAQRCLYRDVTLENLALISSLGCWCGVEDEAAPSKQSIYIQRETQVRTPMAGVSPKKAHPCEMCGPILGDILHVADHQGTHHKQKLHRCEAWGNKLYDSGNFHQHQNEHIGEKPYRGSVEEALFAKRCKLHVSGESSVFSESGKDFLPRSGLLQQEASHTGEKSNSKTECVSPIQCGGAHYSCGESMKHFSTKHILSQHQRLLTREECYVCCECGKSFSKYASLSNHQRVHTEKKHECGECGKSFSKYVSFSNHQRVHTEKKHECGECGKSFSKYVSFSNHQRVHTGKRPYECGECGKSFSKYASFSNHQRVHTEKKHYECGECGKSFSKYVSFSNHQRVHTGKRPYECGECGKSFSKYASFSNHQRVHTDKKHYECGECGKSFSQKSSLIQHQRFHTGEKPYGCEECGKSFSSEGHLRSHQRVHAGERPFKCGECVKSFSHKRSLVHHQRVHSGERPYQCGECGKSFSQKGNLVLHQRVHTGARPYECGECGKSFSSKGHLRNHQQIHTGDRLYECGECGKSFSHKGTLILHQRVHPRERSYGCGECGKSFSSIGHLRSHQRVHTGERPYECGECGKSFSHKRSLVHHQRMHTGERPYKCGDCGKSFNEKGHLRNHQRVHTTERPFKCGECGKCFSHKGNLILHQHGHTGERPYVCRECGKLFKKKSHLLVHQRIHNGEKPYACEACQKFFRNKYQLIAHQRVHTGERPYECNDCGKSFTHSSTFCVHKRIHTGEKPYECSECGKSFAESSSFTKHKRVHTGEKPYECSECGKSFAESSSLTKHKRVHTGEKPYKCEKCGKLFNKKSHLLVHQSSHWRKAI

SEQ ID NO: 16443 - protein, 651 aa, Homo sapiens
MLREEATKKSKEKEPGMALPQGRLTFRDVAIEFSLEEWKCLNPAQRALYRAVMLENYRNLEFVDSSLKSMMEFSSTRHSITGEVIHTGTLQRHKSHHIGDFCFPEMKKDIHHFEFQWQEVERNGHEAPMTKIKKLTGSTDRSDHRHAGNKPIKDQLGLSFHSHLPELHMFQTKGKISNQLDKSIGASSASESQRISCRLKTHISNKYGKNFLHSSFTQIQEICMREKPCQSNECGKAFNYSSLLRRHHITHSREREYKCDVCGKIFNQKQYIVYHHRCHTGEKTYKCNECGKTFTQMSSLVCHRRLHTGEKPYKCNECGKTFSEKSSLRCHRRLHTGEKPYKCNECGKTFGRNSALVIHKAIHTGEKPYKCNECGKTFSQKSSLQCHHILHTGEKPYKCEECDNVYIRRSHLERHRKIHTGEGSYKCKVCDKVFRSDSYLAEHQRVHTGEKPYKCNKCGRSFSRKSSLQYHHTLHTGEKPYTCNECGKVFSRRENLARHHRLHAGEKPYKCEECDKVFSRRSHLERHRRIHTGEKPYKCKVCDKAFRSDSCLANHTRVHTGEKPYKCNKCAKVFNQKGILAQHQRVHTGEKPYKCNECGKVFNQKASLAKHQRVHTAEKPYKCNECGKAFTGQSTLIHHQAIHGCRETLQM

SEQ ID NO: 16444 - protein, 412 aa, Homo sapiens
MSRRKQTNPNKVHWDQVFAGLEEQARQAMMKTDFPGDLGSQRQAIQQLRDQDSSSSDSEGDEEETTQDEVSSHTSEEDGGVVKVEKELENTEQPVGGNEVVEHEVTGNLNSDPLLELCQCPLCQLDCGSREQLIAHVYQHTAAVVSAKSYMCPVCGRALSSPGSLGRHLLIHSEDQRSNCAVCGARFTSHATFNSEKLPEVLNMESLPTVHNEGPSSAEGKDIAFSPPVYPAGILLVCNNCAAYRKLLEAQTPSVRKWALRRQNEPLEVRLQRLERERTAKKSRRDNETPEEREVRRMRDREAKRLQRMQETDEQRARRLQRDREAMRLKRANETPEKRQARLIREREAKRLKRRLEKMDMMLRAQFGQDPSAMAALAAEMNFFQLPVSGVELDSQLLGKMAFEEQNSSSLH

SEQ ID NO: 16445 - protein, 610 aa, Homo sapiens
MDSVAFEDVAVNFTQEEWALLGPSQKSLYRNVMQETIRNLDCIEMKWEDQNIGDQCQNAKRNLRSHTCEIKDDSQCGETFGQIPDSIVNKNTPRVNPCDSGECGEVVLGHSSLNCNIRVDTGHKSCEHQEYGEKPYTHKQRGKAISHQHSFQTHERPPTGKKPFDCKECAKTFSSLGNLRRHMAAHHGDGPYKCKLCGKAFVWPSLFHLHERTHTGEKPYECKQCSKAFPFYSSYLRHERIHTGEKAYECKQCSKAFPDYSTYLRHERTHTGEKPYKCTQCGKAFSCYYYTRLHERTHTGEQPYACKQCGKTFYHHTSFRRHMIRHTGDGPHKCKICGKGFDCPSSVRNHETTHTGEKPYECKQCGKVLSHSSSFRSHMITHTGDGPQKCKICGKAFGCPSLFQRHERTHTGEKPYQCKQCGKAFSLAGSLRRHEATHTGVKPYKCQCGKAFSDLSSFQNHETTHTGEKPYECKECGKAFSCFKYLSQHKRTHTVEKPYECKTCRKAFSHFSNLKVHERIHSGEKPYECKECGKAFSWLTCLLRHERIHTGEKPYECLQCGKAFTRSRFLRGHEKTHTGEKLYECKECGKALSSLRSLHRHKRTHWKDTL

SEQ ID NO: 16446 - protein, 1081 aa, Homo sapiens
MPRRKQEQPKRLPSHVSRQEEAEGELSEGEHWYGNSSETPSEASYGEVQENYKLSLEDRIQEQSTSPDTSLGSTTPSSHTLELVALDSEVLRDSLQCQDHLSPGVSSLCDDDPGSNKPLSSNLRRLLEAGSLKLDAAATANGRVESPVNVGSNLSFSPPSHHAQQLSVLARKLAEKQEQNDQYTPSNRFIWNQGKWLPNSTTTCSLSPDSAILKLKAAANAVLQDKSLTRTEETMRFESFSSPFSSQSASSTLAALSKKVSERSLTPGQEHPPPASSFLSLASMTSSAALLKEVAARAAGSLLAEKSSLLPEDPLPPPPSEKKPEKVTPPPPPPPPPPPPPPPQSLELLLLPVPKGRVSKPSNSASEEESGKPFQCPICGLVIKRKSYWKRHMVIHTGLKSHQCPLCPFRCARKDNLKSHMKVHQHQDRGETFQCQLCPFTSSRHFSLKLHMRCHQHFLRTEAKVKEEIPDPDVKGSPHLSDSACLGQQREGGGTELVGTMMTSNTPERTSQGGAGVSPLLVKEEPKEDNGLPTSFTLNAADRPANHTKLKDPSEYVANSASALFSQDISVKMASDFLMKLSAANQKEPMNLNFKVKEEPKEGESLSTTLPRSSYVFSPESEVSAPGVSEDALKPQEGKGSVLRRDVSVKAASELLMKLSAESYKETQMVKIKEEPMEVDIQDSHVSISPSRNVGYSTLIGREKTEPLQKMPEGRVPPERNLFSQDISVKMASELLFQLSEKVSKEHNHTKENTIRTTTSPFFSEDTFRQSPFTSNSKELLPSDSVLHGRISAPETEKIVLEAGNGLPSWKFNDQLFPCDVCGKVFGRQQTLSRHLSLHTEERKYKCHLCPYAAKCRANLNQHLTVHSVKLVSTDTEDIVSAVTSEGSDGKKHPYYYSCHVCGFETELNVQFVSHMSLHVDKEQWMFSICCTACDFVTMEEAEIKTHIGTKHTGEDRKTPSESNSPSSSSLSALSDSANSKDDSDGSQKNKGGNNLLVISVMPGSQPSLNSEEKPEKGFECVFCNFVCKTKNMFERHLQIHLITRMFECDVCHKFMKTPEQLLEHKKCHTVPTGGLNSGQW

SEQ ID NO: 16447 - protein, 432 aa, Homo sapiens
MPHSPLISIPHVWCHPEEEERMHDELLQAVSKGPVMFRDVSIDFSQEEWECLDADQMNLYKEVMLENFSNLVSVGLSNSKPAVISLLEQGKEPWMVDRELTRGLCSDLESMCETKILSLKKRHFSQVIITREDMSTFIQPTFLIPPQKTMSEEKPWECKICGKTFNQNSQFIQHQRIHFGEKHYESKEYGKSFSRGSLVTRHQRIHTGKKPYECKECGKAFSCSSYFSQHQRIHTGEKPYECKECGKAFKYCSNLNDHQRIHTGEKPYECKVCGKAFTKSSQLFLHLRIHTGEKPYECKECGKAFTQHSRLIQHQRMHTGEKPYECKQCGKAFNSASTLTNHHRIHAGEKLYECEECRKAFIQSSELIQHQRIHTDEKPYECNECGKAFNKGSNLTRHQRIHTGEKPYDCKECGKAFGSRSDLIRHEGIHTG

SEQ ID NO: 16448 - protein, 516 aa, Homo sapiens
MHGRKDDAQKQPVKNQLGLNPQSHLPELQLFQAEGKIYKYDHMEKSVNSSSLVSPPQRISSTVKTHISHTYECNFVDSLFTQKEKANIGTEHYKCSERGKAFHQGLHFTIHQIIHTKETQFKCDICGKIFNKKSNLASHQRIHTGEKPYKCNECGKVFHNMSHLAQHRRIHTGEKPYKCNECGKVFNQISHLAQHQRIHTGEKPYKCNECGKVFHQISHLAQHRTIHTGEKPYECNKCGKVFSRNSYLVQHLIIHTGEKPYRCNVCGKVFHHISHLAQHQRIHTGEKPYKCNECGKVFSHKSSLVNHWRIHTGEKPYKCNECGKVFSHKSSLVNHWRIHTGEKPYKCNECGKVFSRNSYLAQHLIIHAGEKPYKCDECDKAFSQNSHLVQHHRIHTGEKPYKCDECGKVFSQNSYLAYHWRIHTGEKAYKCNECGKVFGLNSSLAHHRKIHTGEKPFKCNECGKAFSMRSSLTNHHAIHTGEKHFKCNECGKLFRDNSYLVRHQRFHAGKKSNTCN

SEQ ID NO: 16449 - protein, 372 aa, Homo sapiens
MASSASARTPAGKRVINQEELRRLMKEKQRLSTSRKRIESPFAKYNRLGQLSCALCNTPVKSELLWQTHVLGKQHREKVAELKGAKEASQGSSASSAPHSVKRKAPDADDQDVKRAKATLVPQVQPSTSAWTTNFDKIGKEFIRATPSKPSGLSLLPDYEDEEEEEEEEEGDGERKRGDASKPLSDAQGKEHSVSSSREVTSSVLPNDFFSTNPPKAPIIPHSGSIEKAEIHEKVVERRENTAEALPEGFFDDPEVDARVRKVDAPKDQMDKEWDEFQKAMRQVNTISEAIVAEEDEEGRLDRQIGEIDEQIECYRRVEKLRNRQDEIKNKLKEILTIKELQKKEEENADSDDEGELQDLLSQDWRVKGALL

SEQ ID NO: 16450 - protein, 1677 aa, Homo sapiens
MEVPEPTCPAPPARDQPAPTPGPPGAPGGQASPHLTLGPVLLPPEQGLAPPTVFLKALPIPLYHTVPPGGLQPRAPLVTGSLDGGNVPFILSPVLQPEGPGPTQVGKPAAPTLTVNIVGTLPVLSPGLGPTLGSPGKVRNAGKYLCPHCGRDCLKPSVLEKHIRSHTGERPFPCATCGIAFKTQSNLYKHRRTQTHLNNSRLSSESEGAGGGLLEEGDKAGEPPRPEGRGESRCQGMHEGASERPLSPGAHVPLLAKNLDVRTEAAPCPGSAFADREAPWDSAPMASPGLPAASTQPWRKLPEQKSPTAGKPCALQRQQATAAEKPWDAKAPEGRLRKCESTDSGYLSRSDSAEQPHAPCSPLHSLSEHSAESEGEGGPGPGPGVAGAEPGAREAGLELEKKRLEERIAQLISHNQAVVDDAQLDNVRPRKTGLSKQGSIDLPTPYTYKDSFHFDIRALEPGRRRAPGPVRSTWTPPDKSRPLFFHSVPTQLSTTVECVPVTRSNSLPFVEGSRTWLEPREPRDPWSRTQKPLSPRPGPARLGCRSGLSSTDVPSGHPRALVRQAAVEDLPGTPIGDALVPAEDTDAKRTAAREAMAGKGRAGGRKCGQRRLKMFSQEKWQVYGDETFKRIYQKMKASPHGGKKAREVGMGSGAELGFPLQKEAAGSSGTVPTQDRRTPVHEDISAGATPEPWGNPPALEASLVTEPTKHGETVARRGDSDRPRVEEAVSSPALGGRDSPCSGSRSPLVSPNGRLELGWQMPPAPGPLKGGDVEAPRPVWPDPKLEGGARGVGDVQETCLWAQTVLRWPSRGSGEDKLPSERKKLKVEDLHSWKQPEPVSAETPGGPTQPASLSSQKQDADPGEVPGGSKESARQVGEPLESSGASLAAASVALKRVGPRDKATPLHPAAPAPAEHPSLATPPQAPRVLSALADNAFSPKYLLRLPQAETPLPLPIPWGPRHSQDSLCSSGWPEERASFVGSGLGTPLSPSPASGPSPGEADSILEDPSCSRPQDGRKGAQLGGDKGDRMATSRPAARELPISAPGAPREATSSPPTPTCEAHLVQDMEGDSHRIHRLCMGSTLARARLSGDVLNPWVPNWELGEPPGNAPEDPSSGPLVGPDPCSPLQPGSFLTALTRPQGVPPGWPELALSSHSGTSRSHSTRSPHSTQNPFPSLKAEPRLTWCCLSRSVPLPAEQKAKAASVYLAVHFPGSSLRDEGPNGPPGSNGGWTWTSPGEGGPAQMSKFSYPTVPGVMPQHQVSEPEWKKGLPWRAKMSRGNSKQRKLKINPKRYKGNFLQSCVQLRASRLRTPTWVRRRSRHPPALEGLKPCRTPGQTSSEIAGLNLQEEPSCATSESPPCCGKEEKKEGDCRQTLGTLSLGTSSRIVREMDKRTVKDISPSAGEHGDCTTHSTAATSGLSLQSDTCLAVVNDVPLPPGKGLDLGLLETQLLASQDSVSTDPKPYIFSDAQRPSSFGSKGTFPHHDIATSVAAVCISLPVRTDHIAQEIHSAESRDHSQTAGRTLTSSSPDSKVTEEGRAQTLLPGRPSSGQRISDSVPLESTEKTHLEIPASGPSSASSHHKEGRHKTFFPSRGQYGCGEMTVPCPSLGSDGRKRQVSGLITRKDSVVPSKPEQPIEIPEAPSKSLKKRSLEGMRKQTRVEFSDTSSDDEDRLVIEI

SEQ ID NO: 16451 - protein, 187 aa, Homo sapiens
MVMHSEDEPYKCKFCGKAFDNLHLYLTHERTHTGEKPYECNKCGKAFSCSSSIRKHARIHTGEKPYICKQCGKAFRYSSSIRNHENTHTGEKPCECKQCGKAFSYSSYFRIHERIHTGEQVYKCKECGKTFTYPSAFHKHKSTHTSQKLYECKECGKAFDCFSSFHSHEGVHTGEKPYECRTWKSLQ

SEQ ID NO: 16452 - protein, 537 aa, Homo sapiens
MEGLLSVALQGAELEGNWKHEGQVEDLQENQESCPEPEAVACKGDPAGDSMQERDEFSRIPRTISSPAATQASVPDDSSSRRCSAPGESPKERHPDSRQRERGGGPKKPWKCGDCGKAFSYCSAFILHQRIHTGEKPFACPECGKAFSQSVHLTLHQRTHTGEKPYACHECGKAFSQGSYLASHWRTHTGEKPHRCADCGKAFTRVTHLTQHRRVHTGERPYACAQCAKAFRNRSSLIEHQRIHTGEKPYECSACAKAFRFSSALIRHQRIHTEEKPYRCGQCAKAFAQIAHLTQHRRVHTGEKPYTCQDCGALFSQSASLAEHRRIHTGEKPYACGQCAKAFTQVSHLTQHQRTHTGERPYPCHDCGKRFSNRSHLLQHRLVHTGERPYRCLQCGAAFSHVSSLIEHQKIHTGERPYKCGECGKAFSQGSSLALHQRTHTGERPYTCPECGKAFSNRSYLIQHHIVHTGEKPYECSGCGKAFSFSSALIRHQRTHADSSGRLCPAPTPDSTPGLSQGGETCQQGCPGRNPRGPAED

SEQ ID NO: 16453 - protein, 936 aa, Homo sapiens
MALTQGPLTFRDVAIEFSQEEWKSLDPVQKALYWDVMLENYRNLVFLGILPKCMTKELPPIGNSNTGEKCQTVTLERHECYDVENFYLREIQKNLQDLEFQWKDGEINYKEVPMTYKNNLNGKRGQHSQEDVENKCIENQLTLSFQSRLTELQKFQTEGKIYECNQSEKTVNNSSLVSPLQRILPSVQTNISKKYENEFLQLSLPTQLEKTHIREKPYMCKGCGKAFRVSSSLINHQMVHTTEKPYKCNECGKAFHRGSLLTIHQIVHTRGKPYQCGVCGKIFRQNSDLVNHRRSHTGEKPYKCNECGKSFSQSYNLAIHQRIHTGEKPYKCNECGKTFKQGSCLTTHQIIHTGEKPYQCDICGKVFRQNSNLVNHQRIHTGEKPYKCNICGKSFSQSSNLATHQTVHSGNKPYKCDECGKTFKRSSSLTTHQIIHTGEKPYTCDVCDKVFSQRSQLARHQRSHTGEKPYKCNECGKVFSQTSHLVGHRRIHTGEKPYKCDKCGKAFKQGSLLTRHKIIHTREKRYQCGECGKVFSENSCLVRHLRIHTGEQPYKCNVCGKVFNYSGNLSIHKRIHTGEKPFQCNECGTVFRNYSCLARHLRIHTGQKPYKCNVCGKVFNDSGNLSNHKRIHTGEKPFQCNECGKVFSYYSCLARHRKIHTGEKPYKCNDCGKAYTQRSSLTKHLIIHTGEKPYNCNEFGGAFIQSSKLARYHRNPTGEKPHKCSHCGRTFSHITGLTYHQRRHTGEMPYKCIECGQVFNSTSNLARHRRIHTGEKPYKCNECGKVFRHQSTLARHRSIHTGEKPYVCNECGKAFRVRSILVNHQKMHTGDKPYKCNECGKAFIERSKLVYHQRNHTGEKPYKCIECGKAFGRFSCLNKHQMIHSGEKPYKCNECGKSFISRSGLTKHQTKHTAESLKTKFNVEKPLDVLLTSGFK

SEQ ID NO: 16454 - protein, 531 aa, Homo sapiens
MEAPAQKAGQGGLPKADAQGASGAREKRPEEPRPLEEDRAGSRPTQKGDLRGAAGGRTTPPGGGSRGCSLGVSPGPGTRHSAGTRPLVREPCGPTSSQNPELVIPEGLQAREGPCRSPARGGDCSRNSCLAWHRGAPAGETPPVCDPCPERIQNHPRTQLCEVHTDCWPCQPGTGAPTCPRTPKPTSRGRNPLVEQPRACACGEAFAWRALRIPQERLQATEEPRPCARCGKRFRPNQQQQAGKSPPVCPECGQTSRPRPIVPDPPAQRLYACDECGKAFTRTSSLLQHQRIHTGERPYECAECGKAFVRCSGLYRHQKTHSAERHRRGPVLARRAFRLGCPPCGDYSERSPRRGSGAGEKPYECADCAKAFGLFSHLVEHRRVHTGEKPYACPECGKAFNQRSNLSRHQRTHSSAKPYACPLCEKAFKGRSGLVQHQRAHTGERPYGCSECGKTFRGCSELRQHERLHSGEKPYICRDCGKAFVRNCSLVRHLRTHTGERPYACGDCGRAFSQRSNLNEHRKRHGGRAAP

SEQ ID NO: 16455 - protein, 811 aa, Homo sapiens
MLLPTTIQPQTARKSQLPRGNSCLVGLHIASPQLLRVQPLVRTEPQSCFLSDLCQPPAQGFVQRPLPALQVVPAKRVPAPKAPDEQGSMLTPLSASDPLAVTSLSSSSAHPFISNLHTRHTEKLKKSLKVKTRSGRVSRPPKYKAKDYKFIKTEDLADGHLSDSDDYSELCVEEDEDQRERHALFDLSSCSLRPKSFKCQTCEKSYIGKGGLARHFKLNPGHGQLDPEMVLSEKASGSTLRGCTEERTLSLTSLGLSMPADPCEGGARSCLVTESARGGLQNGQSVDVEETLPSEPENGALLRSERYQGPRRRACSETLAESRTAVLQQRRAAQLPGGPAAAGEQRASPSKARLKEFLQQCDREDLVELALPQLAQVVTVYEFLLMKVEKDHLAKPFFPAIYKEFEELHKMVKKMCQDYLSSSGLCSQETLEINNDKVAESLGITEFLRKKEIHPDNLGPKHLSRDMDGEQLEGASSEKREREAAEEGLASVKRPRREALSNDTTESLAANSRGREKPRPLHALAAGFSPPVNVTVSPRSEESHTTTVSGGNGSVFQAGPQLQALANLEARRGSIGAALSSRDVSGLPVYAQSGEPRRLTQAQVAAFPGENALEHSSDQDTWDSLRSPGFCSPLSSGGGAESLPPGGPGHAEAGHLGKVCDFHLNHQQPSPTSVLPTEVAAPPLEKILSVDSVAVDCAYRTVPKPGPQPGPHGSLLTEGCLRSLSGDLNRFPCGMEVHSGQRELESVVAVGEAMAFEISNGSHELLSQGQKQIFIQTSDGLILSPPGTIVSQEEDIVTVTDAEGRACGWAR

SEQ ID NO: 16456 - protein, 738 aa, Homo sapiens
MTMLQESFSFDDLSVDFTQKEWQLLDPSQKNLYKDVMLENYSSLVSLGYEVMKPDVIFKLEQGEEPWVGDGEIPSSDSPEVWKVDGNMMWHQDNQDKLKIIKRGHECDAFGKNFNLNMNFVPLRKSNSEGDLDGLILKHHLDLLIPKGDYGKAESDDFNVFDNFFLHSKPEDTDTWLKYYDCDKYKESYKKSQIIIYHRNRLGEKLYECSECRKRFSKKPSLIKHQSRHIRDIAFGCGNCGKTFPQKSQFITHHRTHTGEKPYNCSQCGKAFSQKSQLTSHQRTHTGEKPYECGECGKAFSRKSHLISHWRTHTGEKPYGCNECGRAFSEKSNLINHQRIHTGEKPFECRECGKAFSRKSQLVTHHRTHTGTKPFGCSDCRKAFFEKSELIRHQTIHTGEKPYECSECRKAFRERSSLINHQRTHTGEKPHGCIQCGKAFSQKSHLISHQMTHTGEKPFICSKCGKAFSRKSQLVRHQRTHTGEKPYECSECGKAFSEKLSLTNHQRIHTGEKPYVCSECGKAFCQKSHLISHQRTHTGEKPYECSECGKAFGEKSSLATHQRTHTGEKPYECRDCEKAFSQKSQLNTHQRIHTGEKPYECSLCRKAFFEKSELIRHLRTHTGEKPYECNECRKAFREKSSLINHQRIHTGEKPFECSECGKAFSRKSHLIPHQRTHTGEKPYGCSECRKAFSQKSQLVNHQRIHTGEKPYRCIECGKAFSQKSQLINHQRTHTVKKS

SEQ ID NO: 16457 - protein, 716 aa, Homo sapiens
MSLMGHGKVEMLLYAVPLLKAPNCLSSSMQLPHGGGRHQELVRFRDVAVVFSPEEWDHLTPEQRNLYKDVMLDNCKYLASLGNWTYKAHVMSSLKQGKEPWMMEREVTGDPCPACQPALATFRALNESGNAFRQSFHHGEYRTHRTFVQHYECDDCGMAFGHVSQLTGHQKIHKVGETHEYGENTRGFRHRSSFTMLQRICTLYKHFECNQCGETFNRPSKVIQHQSMHSGLKPYKCDVCQKAFRFLSSLSIHQRFHVGNRVNLTRHQKTHTQRKPFSCNFCGKTFHRFSEKTQHLLIHTRKKYYTCNYCKKEFNPYSKFILHQRTHTGEKPHKCDVCEKSFKSISNLNKHQKTHTGEKPFSCNECKKTFAQRTDLARHQQIHTGKKSFICSSCKKTFVRLSDLTQHKGTHTGERPYQCTTCEKAFKYRSNFTKHQKTHSIGRPFACNECGKTYRLNWELNQHKKIHTGEKPYECGECGKRFNNNSNLNKHKKIHTGEKHFVCNQCGKAFSLNSKLSRHQRTHNKKENSSKSVSNLNKHQKTHAGEKPFPCNECKKAFAQRMDLARHQQIHTGRKPFICSSCKKTFVRLSDLTQHKGTHTGERPYQCTTCEKAFKYQSNFTKHQKTHSIGRPFTCNECGKTFRLNWKLNQHKKIHTGEKPYECGECGKCFNNNSNLSKHKKIHTGEKHFVCNQCGKAFSLNSKLSRHQITHNKKKP

SEQ ID NO: 16458 - protein, 808 aa, Homo sapiens
MLEGHESYDTENFYFREIRKNLQEVDFQWKDGEINYKEGPMTHKNNLTGQRVRHSQGDVENKHMENQLILRFQSGLGELQKFQTAEKIYGCNQIERTVNNCFLASPLQRIFPGVQTNISRKYGNDFLQLSLPTQDEKTHIREKPYIGNECGKAFRVSSSLINHQMIHTTEKPYRCNESGKAFHRGSLLTVHQIVHTRGKPYQCDVCGRIFRQNSDLVNHRRSHTGDKPYICNECGKSFSKSSHLAVHQRIHTGEKPYKCNRCGKCFSQSSSLATHQTVHTGDKPYKCNECGKTFKRNSSLTAHHIIHAGKKPYTCDVCGKVFYQNSQLVRHQIIHTGETPYKCNECGKVFFQRSRLAGHRRIHTGEKPYKCNECGKVFSQHSHLAVHQRVHTGEKPYKCNECGKAFNWGSLLTVHQRIHTGEKPYKCNVCGKVFNYGGYLSVHMRCHTGEKPLHCNKCGMVFTYYSCLARHQRMHTGEKPYKCNVCGKVFIDSGNLSIHRRSHTGEKPFQCNECGKVFSYYSCLARHRKIHTGEKPYKCNDCGKAYTQRSSLTKHLVIHTGENPYHCNEFGEAFIQSSKLARYHRNPTGEKPHKCSECGRTFSHKTSLVYHQRRHTGEMPYKCIECGKVFNSTTTLARHRRIHTGEKPYKCNECGKVFRYRSGLARHWSIHTGEKPYKCNECGKAFRVRSILLNHQMMHTGEKPYKCNECGKAFIERSNLVYHQRNHTGEKPYKCMECGKAFGRRSCLTKHQRIHSSEKPYKCNECGKSYISRSGLTKHQIKHAGENLTTKLNVERPLDVVLTSGIPK

SEQ ID NO: 16459 - protein, 348 aa, Homo sapiens
MRSLPFALTVESVSARAPTCCSTGRFTQGRQPCKCKACGRGFTQSASLLQHWRVHSDWRETLSLSPVRQDLLWPLQPHQAPASPLGRSHSSAGVRQGFSGQLCCWLTKEHTLAEALRLSPVPAGFWGPVEADRPPANSHRRVCPFCCCSCGDSVNEKTSLSQRVLPHPGEKTCRGGSVESVSLAPSSVAPDSTSGLRPCGSPGSFLQHLPPSTLLPRPPFLYPGPPLSLQPLVPSGLPAVPAVPLGGLEVAQVPPATQPAAQQEGAMGPRSCASAGRDSREAVQAPGYPEPARKASQHRAAGPLGEARARLQRQCRAPPPPSNPHWRGALPVFPVWKASSRRSNLARH

SEQ ID NO: 16460 - protein, 666 aa, Homo sapiens
MDLVAFEDVAVNFTQEEWSLLDPSQKNLYREVMQETLRNLASIGEKWKDQNIEDQYKNPRNNLRSLLGERVDENTEENHCGETSSQIPDDTLNKKTSPGVKSCESSVCGEVFVGHSSLNRHIRADTAHKPSEYQEYGQEPYKCQQRKKAFRCHPSFQMQEKAHTGEKLYDCKECGKTFISHSSIQRHMIMHNGDGTYKCKFCGKACPCLSIYLIHERVHTGEKPYKCKQCGKAFSYSTSLQIHERTHTGEKPYECKECGKAFGSPNSLYEHRRTHTGEKPYECKQCGKAFRWFHSFQIHERTHSEEKAYECTKCGKAFKCPSYLCRHEVTHSGKKPCECKQCGKALSYLNFQRHMKMHTRMRPYKCKTVEKPLILPVRFEDMKELTLERNLMNASTVVKPSIVPVPFTIMKGLTLERNPMNVSSVVKPSFLPLPFDIMKGLTLERNRMSVSNVGKPSDLPHTFKCMEGLTLKRNPMNVSSVVKPSFFPLPFDIMKGLTLERNPMSVSNVGKPSHLPHTFKCMKGLTLESNCMNLNNVKKPLDLSETFKFMKRHTLERNPIRNMEKHSTISLPFKYMQQCTEDRMPMNVKSVTKHSYLPRSFEYMQEHTLERNPMNVRNAEKRSIIFLLCVYTKGCTLERNHINVRIVGKHSVCLVPFVDIKGLTLE

SEQ ID NO: 16461 - protein, 970 aa, Homo sapiens
MALSQGLLTFRDVAIEFSQEEWKCLDPAQRTLYRDVMLENYRNLVSLDISSKCMMKEFSSTAQGNTEVIHTGTLQRHERHHIGDFCFQEMEKDIHDFEFQWKEDERNSHEAPMTEIKQLTGSTNRHDQRHAGNKPIKDQLGSSFHSHLPELHMFQTEGKIGNQVEKSINSASLVSTSQRISCRPKTHISKNYGNNFLNSSLLTQKQEVHMREKSFQCNESGKAFNYSSVLRKHQIIHLGAKQYKCDVCGKVFNQKRYLACHRRCHTGKKPYKCNDCGKTFSQELTLTCHHRLHTGEKHYKCSECGKTFSRNSALVIHKAIHTGEKSYKCNECGKTFSQTSYLVYHRRLHTGEKPYKCEECDKAFSFKSNLERHRKIHTGEKPYKCNECSRTFSRKSSLTRHRRLHTGEKPYKCNDCGKTFSQMSSLVYHRRLHTGEKPYKCEECDEAFSFKSNLERHRRIHTGEKPYKCNDCGKTFSQTSSLVYHRRLHTGEKPYKCEECDEAFSFKSNLERHRIIHTGEKLYKCNECGKTFSRKSSLTRHCRLHTGEKPYQCNECGKAFRGQSALIYHQAIHGIGKLYKCNDCHQVFSNATTIANHWRIHNEERSYKCNRCGKFFRHRSYLAVHWRTHSGEKPYKCEECDEAFSFKSNLQRHRRIHTGEKPYRCNECGKTFSRKSYLTCHRRLHTGEKPYKCNECGKTFGRNSALIIHKAIHTGEKPYKCNECGKAFSQKSSLTCHLRLHTGEKPYKCEECDKVFSRKSSLEKHRRIHTGEKPYKCKVCDKAFGRDSHLAQHTRIHTGEKPYKCNECGKNFRHNSALVIHKAIHSGEKPYKCNECGKTFRHNSALEIHKAIHTGEKPYKCSECGKVFNRKANLSRHHRLHTGEKPYKCNKCGKVFNQQAHLACHHRIHTGEKPYKCNECGKTFRHNSVLVIHKTIHTGEKPYKCNECGKVFNRKAKLARHHRIHTGKKH

SEQ ID NO: 16462 - protein, 533 aa, Homo sapiens
MDSSQHLVTFEDVAVDFTQEEWTLLDQAQRDLYRDVMLENYKNLIILAGSELFKRSLMSGLEQMEELRTGVTGVLQELDLQLKTKGSPLLQDISAERSPNGVQLERSNTAEKLYDSNHSGKVFNEHPFLMTHMITHIGEKTSEDNQSGKALRKNFPHSFYKKSHAEGKMPKCVKHEKAFNQFPNLTRQNKTHTQEKLCECKDCWRTFLNQSSLKLHIRSHNGDKHYVCKECGKAFSNSSHLIGHGRIHSGEKPYVCKECGKAFTQSTGLKLHIRTHSGEKPYKCKECGKAFTHSSYLTDHTRIHSGKKPYVCMECGKAFTRSTGLILHMRIHTGEKPYECKECGKAFIHSSYLTKHVRIHSGEKLYLCKACGKAFTRSSGLVLHMRTHTGEKPYECKECGKAFNNSSMLSQHVRIHTGEKPYECKECGKAFTQSSGLSTHLRTHTGEKACECKECGKAFARSTNLNMHMRTHTGEKPYACKECGKAFRYSTYLNVHTRTHTGAKPYECKKCGKNFTQSSALAKHLRTKACEKT

SEQ ID NO: 16463 - protein, 595 aa, Homo sapiens
MGPLTFRDVAIEFSLKEWQCLDTAQRNLYRNVMLENYRNLVFLGITVSKPDLITCLEQGKEAWSMKRHEIMVAKPTVMCSHFAQDLWPEQNIKDSFQKVTLKRYGKCRHENLPLRKGCESMDECKMHKGGCNGLNQCLTATQSKIFQCDKYVKVAHKFSNSNRHEIRHTKKKPFKCTKCGKSFGMISCLTEHSRIHTRVNFYKCEECGKAFNWSSTLTKHKRIHTGEKPYKCEECGKAFNQSSNLIKHKKIHTGEKPYKCEECGKTFNRFSTLTTHKIIHTGEKPYKCKECGKAFNRSSTLTTHRKIHTGEKPYKCEECGKAFKQSSNLTTHKIIHTGEKPYKCKKCGKAFNQSAHLTTHEVIHTGEKPYKCEKCGKAFNHFSHLTTHKIIHTGEKPYKCKECGKAFKHSSTLTKHKIIHTGEKPYKCKECEKAFNQSSKLTEHKKIHTGEKPYECEKCGKAFNQSSNLTRHKKSHTEEKPYKCEECGKGFKWPSTLTIHKIIHTGEKPYKCEECGKAFNQSSKLTKHKKIHTGEKPYTCEECGKAFNQSSNLTKHKRIHTGEKPYKCEECDKAFKWSSVLTKHKIIHTGEKLQI

SEQ ID NO: 16464 - protein, 659 aa, Homo sapiens
MLHQPTPGNRGLTARMEVGPATETFVLELQCLEDGGPGPDTLSGGSGGSESQEEEEPQERNSSPQRPAVSAPVGASEIAEETRPGQRELQLQQLEQQPEPQQQPQHEQLQQPQPHLELQQQPQQDGQQQLSQLQQEKHQSVHHQELKPELQLMHQQQQLQPQQVQEQQRLQQQQEQLQTQQAQEQQVLQQQEQLQQQVQEQQLLQQQQEQLQQQQLLQQQEQLQQQQFQQQQEQLQQQQQLLLLQQQGQLQQQLLQQQQAQLQQQLLEQQQAQLQQQLLLQQQEQLQQQQQQQLLQQQQEQLQQQQLQPPPLEPEEEEEVELELMPVDLGSEQELEQQRQELERQQELERQQEQRQLQLKLQEELQQLEQQLEQQQQQLEQQEVQLELTPVELGAQQQEVQLELTPVQPELQLELVPAAGGGGAAVPGAPAAVVVAPPGYVVVQELMVLPAVAAPAVVAIPGPAGSAALTPARQRRRRRARDRPTICGECGKGFSRSTDLVRHQATHTGERPHRCGECGKGFSQHSNLVTHQRIHTGEKPYACSYCAKRFSESSALVQHQRTHTGERPYACGDCGKRFSVSSNLLRHRRTHSGERPYVCEDCGERFRHKVQIRRHERQLHGAGRSRGLGLLRASRPAALGGPARAEQAATATAPADKAL

SEQ ID NO: 16465 - protein, 632 aa, Homo sapiens
MLREEAAQKRKEKEPGMALPQGHLTFRDVAIEFSLEEWKCLDPTQRALYRAMMLENYRNLHSVDISSKCMMKKFSSTAQGNTEVDTGTLERHESHHIGDFCFQKIGKDIHDFEFQWQEDKRNSHEATMTQIKKLTGSTDRYDRRHPGNKPIKDQLGLSFHSHLPELHIFQTKGKVGNQVEKSINDASSVLTSQRISSRPKIHISNNYENNFFHSSLLTLKQEVHIREKSFQCNESGKAFNCSSLLRKHQIIYLGGKQYKCDVCGKVFNQKRYLACHHRCHTGEKPYKCNECGKVFNQQSNLASHHRLHTGEKPYKCEECDKVFSRKSNLERHRRIHTGEKPYKCKVCEKAFRRDSHLTQHTRIHTGEKPYKCNECGKAFSGQSTLIHHQAIHGIGKLYKCNDCHKVFSNATTIANHWRIHNEERSYKCNKCGKFFRRRSYLVVHWRTHTGEKPYKCNECGKTFHHNSALVIHKAIHTGEKPYKCNECGKTFRHNSALVIHKAIHTGEKPYKCNECGKVFNQQATLARHHRLHTGEKPYKCEECDTVFSRKSHHETHKRIHTGEKPYKCDDFDEAFSQASSYAKQRRIHMGEKHHKCDDCGKAFTSHSHRIRHQRIHTGQKSYKCHKRGKVFS

SEQ ID NO: 16466 - protein, 203 aa, Homo sapiens
MHTGEKPYTCEECVKLLTNPQALLYTGAFILNKNFTNVKNAAKPLLNPHPLINKRIHTGEKPYTCEECGKAFYRSSHLTEHKNIHTGEKSYKCEECGNAFYRSSHLTKHKRIHSGQKPYKCEECGKAFRQSSALNEHKKIHTAEKPYKCKECGKAFRWSRSLNEHTNIHIGEKPYTCEECGKDFTWSSTLTVHQRIQTGEKHS

SEQ ID NO: 16467 - protein, 531 aa, Homo sapiens
MDSVAFEDVAVNFTQEEWALLDPSQKNLYREVMQETLRNLTSIGKKWNNQYIEDEHQNPRRNLRRLIGERLSESKESHQHGEVLTQVPDDTLKKKTPGVQSYESSVCGEIGIGLSSLNRHLRAFSYSSSLAIHGRTHTGEKPYECKECGKAFRFPSSVRRHERIHSAKKPYECKQCGKAFSFPSSVRRHERIHSAKKPYECKQCGKALSYLVSFQTHMRMHTGERPHKCNICGKAFFSPSSLKRHEKSHTGEKRYKCKQCDKAFNCPSSFQYHERTHSGEKPYECTQCRKAFRSVKYLRVHERKHTGEKPYECKLCGKGFISSTSFRYHEKTHTGEKPYECKKCVKAFSFVKDLRIHERTHTGEKPFECKQCGKTFTSSNSFHYHERTHTGEKPYECKQCGKAFRSASVLQKHIRTHTGEKPYGCKQCGKVFRVASQLKMHERTHTGEKPYECKQCGKAFISSNSIRYHKRTHTGEKPYKCKQCGKAFISSNSFLYHERIHTGEKPYECKQCGKAFRSASILQKHVRTHAG

SEQ ID NO: 16468 - protein, 563 aa, Homo sapiens
MARRLLPAHVQESVTFRDVAVFFSQDEWLHLDSAQRALYREVMLENYSILVSLGILFSKPKVISQLEQGEDPWMVESGVPQGAHLGWESLFGTIVSKEENQEVMKKLIIDGTFDFKLEKTYINEDKLEKQQGKKNRLFSKVLVTIKKVYMKERSFKGVEFGKNLGLKSSLIRKPRIVSRGRRPRSQQYSVLFKQLGVNTVRKCYKCNICGKIFLHSSSLSKHQRIHTGEKLYKCKECRKAFSQSSSLTQHLRVHTGEKPYICSECGKAFSFTTSLIGHQRMHTGERPYKCKECGKTFKGSSSLNNHQRIHTGEKPYKCNECGRAFSQCSSLIQHHRIHTGEKPYECTQCGKAFTSISRLSRHHRIHTGEKPFHCNECGKVFSYHSALIIHQRIHTGEKPYACKECGKAFSQSSALIQHQRIHTGEKPYKCNECGKAFSWISRLNIHHRIHTGEKPYNCKECGKAFSSHSGVNTHRKIHTGEKPYKCNDCEKAFNQSSALIQHQRIHTGEKPYNCKVCGKAFRQSSSLMTHMRIHTGEKPYKCKECGKAFSQSSSLTNHQRTHN

SEQ ID NO: 16469 - protein, 577 aa, Homo sapiens
MLRRGHLAFRDVAIEFPQEEWKCLDPAQRTLYREVMVENYRNLVFLGICLPDLSVISMLEQRRDPRNLQSEVKIANNPGGRECIKGVNAESSSKLGSNAGNKSLKNQLGLTFQLHLSELQLFQAERNISGCKHVEKPINNSLVSPLQKIYSSVKSHILNKYRNDFDDSPFLPQEQKAQIREKPCECNEHGKAFRVSSRLANNQVIHTADNPYKCNECDKVFSNSSNLVQHQRIHTGEKPYKCHECGKLFNRISLLARHQRIHTGEKPYKCHECGKVFTQNSHLANHHRIHTGEKPYKCNECGKVFNRNAHLARHQKIHSGEKPYKCKECGKAFSGGSGLTAHLVIHTGEKLYKCNKCGKVFNRNAHLTRHQRIHTGEKPYECKECGKVFRHKFCLTNHHRMHTGEQPYKCNECGKAFRDCSGLTAHLLIHTGEKPYKCKECAKVFRHRLSLSNHQRFHTGEKPYRCDECGKDFTRNSNLANHHRIHTGEKPYKCSECHKVFSHNSHLARHRQIHTGEKSYKCNECGKVFSHKLYLKKHERIHTGEKPYRCHECGKDFTRNSNLANHHRIHTGEKPYR

SEQ ID NO: 16470 - protein, 544 aa, Homo sapiens
MAVMDLSSPWALTKQDSACFHLRNAEEERMIAVFLTTWLQEPMTFKDVAVEFTQEEWMMLDSAQRSLYRDVMLENYRNLTSVEYQLYRLTVISPLDQEEIRNMKKRIPQAICPDQKIQPKTKESTVQKILWEEPSNAVKMIKLTMHNWSSTLREDWECHKIRKQHKIPGGHWRQMIYAPKKTVPQELFRDYHELEENSKLGSKLIFSQSIFTSKHCQKCYSEIGCLKHNSIINNYVKNSISEKLYESHECDTTLWHFQRNQTVQKEYTYSKHGMHFTHNMFPVPNNLHMAQNACECNKDETLCHQSSLKKQGQTHTEKKHECNQCGKAFKRISNLTLYKKSHMGEKQYECKECGKVFNDSSTLRRHVRTHTGEKPYECNQCGKAFSQKTSLKAHMRTHTGEKPYECNQCGKSFGTSSYLIVHKRIHTGEKLYECSECGKAFNTSSHLKVHKKIHTGENVYECSDCGKVFSGVSSLRMHIRTHTGEKPYECKECRKAFSVSSSLRRHVRIHTGEKPYECIQCGKAFSQSSSLIIHKRIHTERETL

SEQ ID NO: 16471 - protein, 601 aa, Homo sapiens
MGPLEFRDVAIEFSLEEWHCLDTAQQNLYRDVMLENYRHLVFLGIVVTKPDLITCLEQGKKPFTVKRHEMIAKSPVMCFHFAQDLCPEQSLKDSFQKVIVTRYEKREYGNLELKKGCESVDEGKVHKRGYNGLNQCLTATQSKVFQCDTYVKVSHIFSNSNRHKIRDTGKKPFKCIECGKAFNQSSTLATHKKIHTGEITCKCEECGKAFNRSSHLTSHKRIHTGEKRYKCEDCGKELKYSSTLTAHKRIHTGEKRYKCEDCGKELKYSSTLTAHKRIHTGEKPYKCDKCGRAFISSSILYVHKISHTEEKPYKCEECGKAFKLSSILSTHKRIHTGEKPYKCEECGKAFRRSLVLRTHKRIHTGEKPYKCDKCGKAFISSSLLYKHKISHSEKKPYKCEECGKAFKRSSTLTIHKISHTEEKPYKCQECDKVFKRSSALSTHKIIHSGEKPYKCEECGKAFKRSSNLTTHKISHTEEKLYKCQECDKAFKYSSALSTHKIIHSGENPYKCEECGKAFKRSSVLSKHKIIHTGAKPYKCEECGKAFKRSSQLTSHKISHTGEKPYKCEECGKAFNLSSDLNTHKRIHIGQKAYIVKNMANL

SEQ ID NO: 16472 - protein, 1191 aa, Homo sapiens
MPGTPGSLEMGLLTFRDVAIEFSPEEWQCLDTAQQNLYRNVMLENYRNLAFLGIALSKPDLITYLEQGKEPWNMKQHEMVDEPTGICPHFPQDFWPEQSMEDSFQKVLLRKYEKCGHENLQLRKGCKSVDECKVHKEGYNKLNQCLTTAQSKVFQCGKYLKVFYKFLNSNRHTIRHTGKKCFKCKKCVKSFCIRLHKTQHKCVYITEKSCKCKECEKTFHWSSTLTNHKEIHTEDKPYKCEECGKAFKQLSTLTTHKIICAKEKIYKCEECGKAFLWSSTLTRHKRIHTGEKPYKCEECGKAFSHSSTLAKHKRIHTGEKPYKCEECGKAFSRSSTLAKHKRIHTGEKPYKCKECGKAFSNSSTLANHKITHTEEKPYKCKECDKAFKRLSTLTKHKIIHAGEKLYKCEECGKAFNRSSNLTIHKFIHTGEKPYKCEECGKAFNWSSSLTKHKRFHTREKPFKCKECGKAFIWSSTLTRHKRIHTGEKPYKCEECGKAFRQSSTLTKHKIIHTGEKPYKFEECGKAFRQSLTLNKHKIIHSREKPYKCKECGKAFKQFSTLTTHKIIHAGKKLYKCEECGKAFNHSSSLSTHKIIHTGEKSYKCEECGKAFLWSSTLRRHKRIHTGEKPYKCEECGKAFSHSSALAKHKRIHTGEKPYKCKECGKAFSNSSTLANHKITHTEEKPYKCKECDKTFKRLSTLTKHKIIHAGEKLYKCEECGKAFNRSSNLTIHKFIHTGEKPYKCEECGKAFNWSSSLTKHKRIHTREKPFKCKECGKAFIWSSTLTRHKRIHTGEKPYKCEECGKAFSRSSTLTKHKTIHTGEKPYKCKECGKAFKHSSALAKHKIIHAGEKLYKCEECGKAFNQSSNLTTHKIIHTKEKPSKSEECDKAFIWSSTLTEHKRIHTREKTYKCEECGKAFSQPSHLTTHKRMHTGEKPYKCEECGKAFSQSSTLTTHKIIHTGEKPYKCEECGKAFRKSSTLTEHKIIHTGEKPYKCEECGKAFSQSSTLTRHTRMHTGEKPYKCEECGKAFNRSSKLTTHKIIHTGEKPYKCEECGKAFISSSTLNGHKRIHTREKPYKCEECGKAFSQSSTLTRHKRLHTGEKPYKCGECGKAFKESSALTKHKIIHTGEKPYKCEKCGKAFNQSSILTNHKKIHTITPVIPLLWEAEAGGSRGQEMETILANTVKPLLY

SEQ ID NO: 16473 - protein, 586 aa, Homo sapiens
MGPLTFRDVKIEFSLEEWQCLDTAQRNLYRDVMLENYRNLVFLGIAVSKPDLITWLEQGKEPWNLKRHEMVDKTPVMCSHFAQDVWPEHSIKDSFQKVILRTYGKYGHENLQLRKDHKSVDACKVYKGGYNGLNQCLTTTDSKIFQCDKYVKVFHKFPNVNRNKIRHTGKKPFKCKNRGKSFCMLSQLTQHKKIHTREYSYKCEECGKAFNWSSTLTKHKIIHTGEKPYKCEECGKAFNRSSNLTKHKIIHTGEKPYKCEECGKAFNRSSTLTKHKRIHTEEKPYKCEECGKAFNQFSILNKHKRIHMEDKPYKCEECGKAFRVFSILKKHKIIHTGEKPYKCEECGKAFNQFSNLTKHKIIHTGEKPYKCDECGKAFNQSSTLTKHKRIHTGEKPYKCEECGKAFKQSSTLTEHKIIHTGEKPYKCEKCGKAFSWSSAFTKHKRNHMEDKPYKCEECGKAFSVFSTLTKHKIIHTREKPYKCEECGKAFNQSSIFTKHKIIHTEGKSYKCEKCGNAFNQSSNLTARKIIYTGEKPYKYEECDKAFNKFSTLITHQIIYTGEKPCKHECGRAFNKSSNYTKEKLQT

SEQ ID NO: 16474 - protein, 620 aa, Homo sapiens
MGPLQFRDVAIEFSLEEWHCLDTAQRNLYRNVMLENYSNLVFLGIVVSKPDLIAHLEQGKKPLTMKRHEMVANPSVICSHFAQDLWPEQNIKDSFQKVILRRYEKRGHGNLQLIKRCESVDECKVHTGGYNGLNQCSTTTQSKVFQCDKYGKVFHKFSNSNRHNIRHTEKKPFKCIECGKAFNQFSTLITHKKIHTGEKPYICEECGKAFKYSSALNTHKRIHTGEKPYKCDKCDKAFIASSTLSKHEIIHTGKKPYKCEECGKAFNQSSTLTKHKKIHTGEKPYKCEECGKAFNQSSTLTKHKKIHTGEKPYVCEECGKAFKYSRILTTHKRIHTGEKPYKCNKCGKAFIASSTLSRHEFIHMGKKHYKCEECGKAFIWSSVLTRHKRVHTGEKPYKCEECGKAFKYSSTLSSHKRSHTGEKPYKCEECGKAFVASSTLSKHEIIHTGKKPYKCEECGKAFNQSSSLTKHKKIHTGEKPYKCEECGKAFNQSSSLTKHKKIHTGEKPYKCEECGKAFNQSSTLIKHKKIHTREKPYKCEECGKAFHLSTHLTTHKILHTGEKPYRCRECGKAFNHSATLSSHKKIHSGEKPYECDKCGKAFISPSSLSRHEIIHTGEKP

SEQ ID NO: 16475 - protein, 572 aa, Homo sapiens; identical to SEQ ID NO: 14458

SEQ ID NO: 16476 - protein, 864 aa, Homo sapiens
MGSLTFWDVTIEFALEEWQCLDMAQQNLYRNVMLENYRNLVFLGIAVSKLDLITCLKQGKEPWNMKRHEMVTKPPVISSHFTQDFWPDQSIKDSFQEIILRTYARCGHKNLRLRKDCESVNEGKMHEEAYNKLNQCWTTTQGKIFQCNKYVKVFHKYSNSNRYKIRHTKKKTFKCMKCSKSFFMLSHLIQHKRIHTRENIYKCEERGKAFKWFSTLIKHKIIHTEDKPYKYKKCGKAFNISSMFTKCKIIHTGKKPCKCEECGKVFNNSSTLMKHKIIHTGKKPYKCEECGKAFKQSSHLTRHKAIHTGEKPYKCEECGKAFNHFSALRKHQIIHTGKKPYKCEECGKAFSQSSTLRKHEIIHTEEKPYKYEECGKAFSNLSALRKHEIIHTGQKPYKCEECGKAFKWSSKLTVHKVIHTAEKPCKCEECGKAFKRFSALRKHKIIHTGKQPYKCEECSKAFSNFSALRKHEIIHTGEKPYKCEECGKAFKWSSKLTVHKVIHMEEKPCKCEECGKAFKHFSALRKHKIIHTGKKPYKCEECGKAFNNSSTLMKHKIIHTGKKPYKCEECGKAFKQSSHLTRHKAIHTGEKPYKCEECGKAFNHFSALRKHQIIHTGKKPYKCEECGKAFSQSSTLRKHEIIHTGEKPYKCEECGKAFKWSSHLTRHKVIHTEEKPYKCEECGKAFNHFSALRKHKIIHTGKKPYKCEECGKAFSQSSTLRKHEIIHTGEKPYKCEECGKAFKWSSKLTVHKVIHTAEKPCKCEECGKAFKHFSALRKHKIIHTGKKPYKCEECGKAFNNSSTLRKHEIIHTGEKSYKCEECGKAFQWSSKLTLHKVIHMERNPANVKNVAKLLNISQPLENMR

SEQ ID NO: 16477 - protein, 1918 aa, Homo sapiens
MEERRPHLDARPRNSHTNHRGPVDGELPPRARNQANNPPANALRGGASHPGRHPRANNHPAAYWQREERFRAMGRNPHQGRRNQEGHASDEARDQRHDQENDTRWRNGNQDCRNRRPPWSNDNFQQWRTPHQKPTEQPQQAKKLGYKFLESLLQKDPSEVVITLATSLGLKELLSHSSMKSNFLELICQVLRKACSSKMDRQSVLHVLGILKNSKFLKVCLPAYVVGMITEPIPDIRNQYPEHISNIISLLQDLVSVFPASSVQETSMLVSLLPTSLNALRASGVDIEEETEKNLEKVQTIIEHLQEKRREGTLRVDTYTLVQPEAEDHVESYRTMPIYPTYNEVHLDERPFLRPNIISGKYDSTAIYLDTHFRLLREDFVRPLREGILELLQSFEDQGLRKRKFDDIRIYFDTRIITPMCSSSGIVYKVQFDTKPLKFVRWQNSKRLLYGSLVCMSKDNFETFLFATVSNREQEDLCRGIVQLCFNEQSQQLLAEVQPSDSFLMVETTAYFEAYRHVLEGLQEVQEEDVPFQRNIVECNSHVKEPRYLLMGGRYDFTPLIENPSATGEFLRNVEGLRHPRINVLDPGQWPSKEALKLDDSQMEALQFALTRELAIIQGPPGTGKTYVGLKIVQALLTNESVWQISLQKFPILVVCYTNHALDQFLEGIYNCQKTSIVRVGGRSNSEILKQFTLRELRNKREFRRNLPMHLRRAYMSIMTQMKESEQELHEGAKTLECTMRGVLREQYLQKYISPQHWESLMNGPVQDSEWICFQHWKHSMMLEWLGLGVGSFTQSVSPAGPENTAQAEGDEEEEGEEESSLIEIAEEADLIQADRVIEEEEVVRPQRRKKEESGADQELAKMLLAMRLDHCGTGTAAGQEQATGEWQTQRNQKKKMKKRVKDELRKLNTMTAAEANEIEDVWQLDLSSRWQLYRLWLQLYQADTRRKILSYERQYRTSAERMAELRLQEDLHILKDAQVVGMTTTGAAKYRQILQKVEPRIVIVEEAAEVLEAHTIATLSKACQHLILIGDHQQLRPSANVYDLAKNFNLEVSLFERLVKVNIPFVRLNYQHRMCPEIARLLTPHIYQDLENHPSVLKYEKIKGVSSNLFFVEHNFPEQEIQEGKSHQNQHEAHFVVELCKYFLCQEYLPSQITILTTYTGQLFCLRKLMPAKTFAGVRVHVVDKYQGEENDIILLSLVRSNQEGKVGFLQISNRICVALSRAKKGMYCIGNMQMLAKVPLWSKIIHTLRENNQIGPMLRLCCQNHPETHTLVSKASDFQKVPEGGCSLPCEFRLGCGHVCTRACHPYDSSHKEFQCMKPCQKVICQEGHRCPLVCFQECQPCQVKVPKTIPRCGHEQMVPCSVPESDFCCQEPCSKSLRCGHRCSHPCGEDCVQLCSEMVTIKLKCGHSQPVKCGHVEGLLYGGLLVKCTTKCGTILDCGHPCPGSCHSCFEGRFHERCQQPCKRLLICSHKCQEPCIGECPPCQRTCQNRCVHSQCKKKCGELCSPCVEPCVWRCQHYQCTKLCSEPCNRPPCYVPCTKLLVCGHPCIGLCGEPCPKKCRICHMDEVTQIFFGFEDEPDARFVQLEDCSHIFEVQALDRYMNEQKDDEVAIRLKVCPICQVPIRKNLRYGTSIKQRLEEIEIIKEKIQGSAGEIATSQERLKALLERKSLLHQLLPEDFLMLKEKLAQKNLSVKDLGLVENYISFYDHLASLWDSLKKMHVLEEKRVRTRLEQVHEWLAKKRLSFTSQELSDLRSEIQRLTYLVNLLTRYKIAEKKVKDSIAVEVYSVQNILEKTCKFTQEDEQLVQEKMEALKATLPCSGLGISEEERVQIVSAIGYPRGHWFKCRNGHIYVIGDCGGAMERGTCPDCKEVIGGTNHTLERSNQLASEMDGAQHAAWSDTANNLMNFEEIQGMM

SEQ ID NO: 16478 - protein, 408 aa, Homo sapiens
MLPRPKAPASPRRPQTPTPSEQDADPGPASPRDTEAQRLRFRQFQYHVASGPHLALGQLWTLCRQWLRPEARSKEQMLELLVLEQFLGALPSKMRTWVQSQGPRSCREAASLVEDLTQMCQQEVLVSLDSVEPQDWSFGEEEDGKSPRSQKEPSQASELILDAVAAAPALPEESEWLETTQLQQSLHTRAEAEAPRAPGLLGSRARLPLKPSIWDEPEDLLAGPSSDLRAEGTVISSPKGPSAQRISPRRRNRNTDQSGRHQPSLKHTKGGTQEAVAGISVVPRGPRGGRPFQCADCGMVFTWVTHFIEHQKTHREEGPFPCPECGKVFLHNSVLTEHGKIHLLEPPRKKAPRSKGPRESVPPRDGAQGPVAPRSPKRPFQCSVCGKAFPWMVHLIDHQKLHTAHGHM

SEQ ID NO: 16479 - protein, 725 aa, Homo sapiens
MGPRASLSRLRELCGHWLRPALHTKKQILELLVLEQFLSVLPPHLLGRLQGQPLRDGEEVVLLLEGIHREPSHAGPLDFSCNAGKSCPRADVTLEEKGCASQVPSHSPKKELPAEEPSVLGPSDEPPRPQPRAAQPAEPGQWRLPPSSKQPLSPGPQKTFQALQESSPQGPSPWPEESSRDQELAAVLECLTFEDVPENKAWPAHPLGFGSRTPDKEEFKQEEPKGAAWPTPILAESQADSPGVPGEPCAQSLGRGAAASGPGEDGSLLGSSEILEVKVAEGVPEPNPELQFICADCGVSFPQLSRLKAHQLRSHPAGRSFLCLCCGKSFGRSSILKLHMRTHTDERPHACHLCGHRFRQSSHLSKHLLTHSSEPAFLCAECGRGFQRRASLVQHLLAHAQDQKPPCAPESKAEAPPLTDVLCSHCGQSFQRRSSLKRHLRIHARDKDRRSSEGSGSRRRDSDRRPFVCSDCGKAFRRSEHLVAHRRVHTGERPFSCQACGRSFTQSSQLVSHQRVHTGEKPYACPQCGKRFVRRASLARHLLTHGGPRPHHCTQCGKSFGQTQDLARHQRSHTGEKPCRCSECGEGFSQSAHLARHQRIHTGEKPHACDTCGHRFRNSSNLARHRRSHTGERPYSCQTCGRSFRRNAHLRRHLATHAEPGQEQAEPPQECVECGKSFSRSCNLLRHLLVHTGARPYSCTQCGRSFSRNSHLLRHLRTHARETLY

SEQ ID NO: 16480 - protein, 604 aa, Homo sapiens
MASTWAIQAHMDQDEPLEVKIEEEKYTTRQDWDLRKNNTHSREVFRQYFRQFCYQETSGPREALSRLRELCHQWLRPETHTKEQILELLVLEQFLTILPEELQAWVQEQHPESGEEVVTVLEDLERELDEPGEQVSVHTGEQEMFLQETVRLRKEGEPSMSLQSMKAQPKYESPELESQQEQVLDVETGNEYGNLKQEVSEEMEPHGKTSSKFENDMSKSARCGETREPEEITEEPSACSREDKQPTCDENGVSLTENSDHTEHQRICPGEESYGCDDCGKAFSQHSHLIEHQRIHTGDRPYKCEECGKAFRGRTVLIRHKIIHTGEKPYKCNECGKAFGRWSALNQHQRLHTGEKHYHCNDCGKAFSQKAGLFHHIKIHTRDKPYQCTQCNKSFSRRSILTQHQGVHTGAKPYECNECGKAFVYNSSLVSHQEIHHKEKCYQCKECGKSFSQSGLIQHQRIHTGEKPYKCDVCEKAFIQRTSLTEHQRIHTGERPYKCDKCGKAFTQRSVLTEHQRIHTGERPYKCDECGNAFRGITSLIQHQRIHTGEKPYQCDECGKAFRQRKKTSYKEILLKNHSEPQAGVNLLLSSLIPEWQSCFRRDL

SEQ ID NO: 16481 - protein, 348 aa, Homo sapiens
MTTALEPEDQKGLLIIKAEDHYWGQDSSSQKCSPHRRELYRQHFRKLCYQDAPGPREALTQLWELCRQWLRPECHTKEQILDLLVLEQFLSILPKDLQAWVRAHHPETGEEAVTVLEDLERELDEPGKQVPGNSERRDILMDKLAPLGRPYESLTVQLHPKKTQLEQEAGKPQRNGDKTRTKNEELFQKEDMPKDKEFLGEINDRLNKDTPQHPKSKDIIENEGRSEWQQRERRRYKCDECGKSFSHSSDLSKHRRTHTGEKPYKCDECGKAFIQRSHLIGHHRVHTGVKPYKCKECGKDFSGRTGLIQHQRIHTGEKPYECDECGRPFRVSSALIRHQRIHTANKLY

SEQ ID NO: 16482 - protein, 510 aa, Homo sapiens
MLPLEKAFASPRSSPAPPDLPTPGSAAGVQQEEPETIPERTPADLEFSRLRFREFVYQEAAGPHQTLARLHELCRQWLMPEARSKEQMLELLVLEQFLGILPDKVRPWVVAQYPESCKKAASLVEGLADVLEEPGMLLGSPAGSSSILSDGVYERHMDPLLLPGELASPSQALGAGEIPAPSETPWLSPDPLFLEQRRVREAKTEEDGPANTEQKLKSFPEDPQHLGEWGHLDPAEENLKSYRKLLLWGYQLSQPDAASRLDTEELRLVERDPQGSSLPEGGRRQESAGCACEEAAPAGVLPELPTEAPPGDALADPPSGTTEEEEEQPGKAPDPQDPQDAESDSATGSQRQSVIQQPAPDRGTAKLGTKRPHPEDGDGQSLEGVSSSGDSAGLEAGQGPGADEPGLSRGKPYACGECGEAFAWLSHLMEHHSSHGGRKRYACQGCWKTFHFSLALAEHQKTHEKEKSYALGGARGPQPSTREAQAGARAGGPPESVEGEAPPAPPEAQR

SEQ ID NO: 16483 - protein, 614 aa, Homo sapiens
MMAADIPRVTTPLSSLVQVPQEEDRQEEEVTTMILEDDSWVQEAVLQEDGPESEPFPQSAGKGGPQEEVTRGPQGALGRLRELCRRWLRPEVHTKEQMLTMLPKEIQAWLQEHRPESSEEAAALVEDLTQTLQDSDFEIQSENGENCNQDMFENESRKIFSEMPEGESAQHSDGESDFERDAGIQRLQGHSPGEDHGEVVSQDREVGQLIGLQGTYLGEKPYECPQCGKTFSRKSHLITHERTHTGEKYYKCDECGKSFSDGSNFSRHQTTHTGEKPYKCRDCGKSFSRSANLITHQRIHTGEKPFQCAECGKSFSRSPNLIAHQRTHTGEKPYSCPECGKSFGNRSSLNTHQGIHTGEKPYECKECGESFSYNSNLIRHQRIHTGEKPYKCTDCGQRFSQSSALITHRRTHTGEKPYQCSECGKSFSRSSNLATHRRTHMVEKPYKCGVCGKSFSQSSSLIAHQGMHTGEKPYECLTCGESFSWSSNLLKHQRIHTGEKPYKCSECGKCFSQRSQLVVHQRTHTGEKPYKCLMCGKSFSRGSILVMHQRAHLGDKPYRCPECGKGFSWNSVLIIHQRIHTGEKPYKCPECGKGFSNSSNFITHQRTHMKEKLY

SEQ ID NO: 16484 - protein, 1043 aa, Homo sapiens
MAMALELQAQASPQPEPEELLIVKLEEDSWGSESKLWEKDRGSVSGPEASRQRFRQFQYRDAAGPHEAFSQLWALCCRWLRPEIRLKEQILELLVLEQFLTILPREVQTWVQARHPESGEEAVALVEDWHRETRTAGQSGLELHTEETRPLKTGEEAQSFQLQPVDPWPEGQSQKKGVKNTCPDLPNHLNAEVAPQPLKESAVLTPRVPTLPKMGSVGDWEVTAESQEALGPGKHAEKELCKDPPGDDCGNSVCLGVPVSKPSNTSEKEQGPEFWGLSLINSGKRSTADYSLDNEPAQALTWRDSRAWEEQYQWDVEDMKVSGVHWGYEETKTFLAILSESPFSEKLRTCHQNRQVYRAIAEQLRARGFLRTLEQCRYRVKNLLRNYRKAKSSHPPGTCPFYEELEALVRARTAIRATDGPGEAVALPRLGYSDAEMDEQEEGGWDPEEMAEDCNGAGLVNVESTQGPRIAGAPALFQSRIAGVHWGYEETKAFLAILSESPFSEKLRTCHQNSQVYRAIAERLCALGFLRTLEQCRYRFKNLLRSYRKAKSSHPPGTCPFYEELDSLMRARAAVRAMGTVREAAGLPRCGQSSAETDAQEAWGEVANEDAVKPSTLCPKAPDMGFEMRHEDEDQISEQDIFEGLPGALSKCPTEAVCQPLDWGEDSENENEDEGQWGNPSQEQWQESSSEEDLEKLIDHQGLYLAEKPYKCDTCMKSFSRSSHFIAHQRIHTGEKPYKCLECGKNFSDRSNLNTHQRIHTGEKPYKCLECGKSFSDHSNLITHQRIHTGEKPYKCGECWKSFNQSSNLLKHQRIHLGGNPDQCSEPGGNFAQSPSFSAHWRNSTEETAPEQPQSISKDLNSPGPHSTNSGEKLYECSECGRSFSKSSALISHQRIHTGEKPYECAECGKSFSKSSTLANHQRTHTGEKPYKCVDCGKCFSERSKLITHQRVHTGEKPYKCLECGKFFRDRSNLITHQRIHTGEKPYKCRECGKCFNQSSSLIIHQRIHTGEKPYKCTECGKDFNNSSHFSAHRRTHAGGKAS

SEQ ID NO: 16485 - protein, 473 aa, Homo sapiens
MMTKVLGMAPVLGPRPPQEQVGPLMVKVEEKEEKGKYLPSLEMFRQRFRQFGYHDTPGPREALSQLRVLCCEWLRPEIHTKEQILELLVLEQFLTILPQELQAWVQEHCPESAEEAVTLLEDLERELDEPGHQVSTPPNEQKPVWEKISSSGTAKESPSSMQPQPLETSHKYESWGPLYIQESGEEQEFAQDPRKVRDCRLSTQHEESADEQKGSEAEGLKGDIISVIIANKPEASLERQCVNLENEKGTKPPLQEAGSKKGRESVPTKPTPGERRYICAECGKAFSNSSNLTKHRRTHTGEKPYVCTKCGKAFSHSSNLTLHYRTHLVDRPYDCKCGKAFGQSSDLLKHQRMHTEEAPYQCKDCGKAFSGKGSLIRHYRIHTGEKPYQCNECGKSFSQHAGLSSHQRLHTGEKPYKCKECGKAFNHSSNFNKHHRIHTGEKPYWCHHCGKTFCSKSNLSKHQRVHTGEGEAP

SEQ ID NO: 16486 - protein, 491 aa, Homo sapiens
MAIPKHSLSPVPWEEDSFLQVKVEEEEEASLSQGGESSHDHIAHSEAARLRFRHFRYEEASGPHEALAHLRALCCQWLQPEAHSKEQILELLVLEQFLGALPPEIQAWVGAQSPKSGEEAAVLVEDLTQVLDKRGWDPGAEPTEASCKQSDLGESEPSNVTETLMGGVSLGPAFVKACEPEGSSERSGLSGEIWTKSVTQQIHFKKTSGPYKDVPTDQRGRESGASRNSSSAWPNLTSQEKPPSEDKFDLVDAYGTEPPYTYSGKRSSKCRECRKMFQSASALEAHQKTHSRKTPYACSECGKAFSRSTHLAQHQVVHTGAKPHECKECGKAFSRVTHLTQHQRIHTGEKPYKCGECGKTFSRSTHLTQHQRVHTGERPYECDACGKAFSQSTHLTQHQRIHTGEKPYKCDACGRAFSDCSALIRHLRIHSGEKPYQCKVCPKAFAQSSSLIEHQRIHTGEKPYKCSDCGKAFSRSSALMVHLRIHITVLQ

SEQ ID NO: 16487 - protein, 389 aa, Homo sapiens
MAITLTLQTAEMQEGLLAVKVKEEEEEHSCGPESGLSRNNPHTREIFRRRFRQFCYQESPGPREALQRLQELCHQWLRPEMHTKEQILELLVLEQFLTILPEELQAWVRQHRPVSGEEAVTVLEDLERELDDPGEQVLSHAHEQEEFVKEKATPGAAQESSNDQFQTLEEQLGYNLREVCPVQEIDGKAGTWNVELAPKREISQEVKSLIQVLGKQNGNITQIPEYGDTCDREGRLEKQRVSSSVERPYICSECGKSFTQNSILIEHQRTHTGEKPYECDECGRAFSQRSGLFQHQRLHTGEKRYQCSVCGKAFSQNAGLFHHLRIHTGEKPYQCNQCNKSFSRRSVLIKHQRIHTGERPYECEECGKNFIYHCNLIQHRKVHPVAESS

SEQ ID NO: 16488 - protein, 544 aa, Homo sapiens
MLKEHPEMAEAPQQQLGIPVVKLEKELPWGRGREDPSPETFRLRFRQFRYQEAAGPQEALRELQELCRRWLRPELHTKEQILELLVLEQFLTILPREFYAWIREHGPESGKALAAMVEDLTERALEAKAVPCHRQGEQEETALCRGAWEPGIQLGPVEVKPEWGMPPGEGVQGPDPGTEEQLSQDPGDETRAFQEQALPVLQAGPGLPAVNPRDQEMAAGFFTAGSQGLGPFKDMALAFPEEEWRHVTPAQIDCFGEYVEPQDCRVSPGGGSKEKEAKPPQEDLKGALVALTSERFGEASLQGPGLGRVCEQEPGGPAGSAPGLPPPQHGAIPLPDEVKTHSSFWKPFQCPECGKGFSRSSNLVRHQRTHEEKSYGCVECGKGFTLREYLMKHQRTHLGKRPYVCSECWKTFSQRHHLEVHQRSHTGEKPYKCGDCWKSFSRRQHLQVHRRTHTGEKPYTCECGKSFSRNANLAVHRRAHTGEKPYGCQVCGKRFSKGERLVRHQRIHTGEKPYHCPACGRSFNQRSILNRHQKTQHRQEPLVQ

SEQ ID NO: 16489 - protein, 478 aa, Homo sapiens
MATALVSAHSLAPLNLKKEGLRVVREDHYSTWEQGFKLQGNSKGLGQEPLCKQFRQLRYEETTGPREALSRLRELCQQWLQPETHTKEQILELLVLEQFLIILPKELQARVQEHHPESREDVVVVLEDLQLDLGETGQQDPDQPKKQKILVEEMAPLKGVQEQQVRHECEVTKPEKEKGEETRIENGKLIVVTDSCGRVESSGKISEPMEAHNEGSNLERHQAKPKEKIEYKCSEREQRFIQHLDLIEHASTHTGKKLCESDVCQSSSLTGHKKVLSREKGHQCHECGKAFQRSSHLVRHQKIHLGEKPYQCNECGKVFSQNAGLLEHLRIHTGEKPYLCIHCGKNFRRSSHLNRHQRIHSQEEPCECKECGKTFSQALLLTHHQRIHSHSKSHQCNECGKAFSLTSDLIRHHRIHTGEKPFKCNICQKAFRLNSHLAQHVRIHNEEKPYQCSECGEAFRQRSGLFQHQRYHHKDKLA

SEQ ID NO: 16490 - protein, 852 aa, Homo sapiens; identical to SEQ ID NO: 14472

SEQ ID NO: 16491 - protein, 494 aa, Homo sapiens
MSGEATVLAYHAPEEQEGLLVVKVEEENYVLDQDFGLQENPWSQEVFRQKFRQFSYSDSTGPREALSRLRELCCQWLRPEVHSKEQILELLMLEQFLAILPEELQAWLREHRPENGEEAVTMLEELEKELEEPRQQDTTHGQEMFWQEMTSTGALKSLSLNSPVQPLENQCKTETQESQAFQERDGRMVAGKVLMAKQEIVECVASAAMISPGKLPGETHSQRIAEEALGGLDNSKKQKGNAAGNKISQLPSQDRHFSLATFNRRIPTEHSVLESHESEGSFSMNSNDITQQSVDTREKLYECFDCGKAFCQSSKLIRHQRIHTGERPYACKECGKAFSLSSDLVRHQRIHSGEKPYECCECGKAFRGSSELIRHRRIHTGEKPYECGECGKAFSRSSALIQHKKIHTGDKSYECIACGKAFGRSSILIEHQRIHTGEKPYECNECGKSFNQSSALTQHQRIHTGEKPYECSECRKTFRHRSGLMQHQRTHTRV

SEQ ID NO: 16492 - protein, 406 aa, Homo sapiens
MASTEEQYDLKIVKVEEDPIWDQETHLRGNNFSGQEASRQLFRQFCYQETPGPREALSRLRELCHQWLRPEIHTKEQILELLVLEQFLTILPEELQAWVREHHPESGEEAVAVVEDLEQELSEPGNQAPDHEHGHSEVLLEDVEHLKVKQEPTDIQLQPMVTQLRYESFCLHQFQEQDGESIPENQELASKQEILKEMEHLGDSKLQRDVSLDSKYRETCKRDSKAEKQQAHSTGERRHRCNECGKSFTKSSVLIEHQRIHTGEKPYECEECGKAFSRRSSLNEHRRSHTGEKPYQCKECGKAFSASNGLTRHRRIHTGEKPYECKVCGKAFLLSSCLVQHQRIHTGEKRYQCRECGKAFIQNAGLFQHLRVHTGEKPYQCSQCSKLFSKRTLLKKHQKIHTGERP

SEQ ID NO: 16493 - protein, 697 aa, Homo sapiens
MMAAVKSTEAHPSSNKDPTQGQKSALQGNSPDSEASRQRFRQFCYQEVTGPHEAFSKLWELCCQWLRPKTHSKEEILELLVLEQFLTILPEEIQTWVREQHPENGEEAVALVEDVQRAPGQQVLDSEKDLKVLMKEMAPLGATRESLRSQWKQEVQPEEPTFKGSQSSHQRPGEQSEAWLAPQAPRNLPQNTGLHDQETGAVVWTAGSQGPAMRDNRAVSLCQQEWMCPGPAQRALYRGATQRKDSHVSLATGVPWGYEETKTLLAILSSSQFYGKLQTCQQNSQIYRAMAEGLWEQGFLRTPEQCRTKFKSLQLSYRKVRRGRVPEPCIFYEEMNALSGSWASAPPMASDAVPGQEGSDIEAGELNHQNGEPTEVEDGTVDGADRDEKDFRNPGQEVRKLDLPVLFPNRLGFEFKNEIKKENLKWDDSEEVEINKALQRKSRGVYWHSELQKGLESEPTSRRQCRNSPGESEEKTPSQEKMSHQSFCARDKACTHILCGKNCSQSVHSPHKPALKLEKVSQCPECGKTFSRSSYLVRHQRIHTGEKPHKCSECGKGFSERSNLTAHLRTHTGERPYQCGQCGKSFNQSSSLIVHQRTHTGEKPYQCIVCGKRFNNSSQFSAHRRIHTGESPYKCAVCGKIFNNSSHFSAHRKTHTGEKPYRCSHCERGFTKNSALTRHQTVHMKAVLSSQEGRDAL

SEQ ID NO: 16494 - protein, 433 aa, Homo sapiens
MALDLRTIFQCEPSENNLGSENSAFQQSQGPAVQREEGISEFSRMVLNSFQDSNNSYARQELQRLYRIFHSWLQPEKHSKDEIISLLVLEQFMIGGHCNDKASVKEKWKSSGKNLERFIEDLTDDSINPPALVHVHMQGQEALFSEDMPLRDVIVHLTKQVNAQTTREANMGTPSQTSQDTSLETGQGYEDEQDGWNSSSKTTRVNENITNQGNQIVSLIIIQEENGPRPEEGGVSSDNPYNSKRAELVTARSQEGSINGITFQGVPMVMGAGCISQPEQSSPESALTHQSNEGNSTCEVHQKGSHGVQKSYKCEECPKVFKYLCHLLAHQRRHRNERPFVCPECQKGFFQISDLRVHQIIHTGKKPFTCSMCKKSFSHKTNLRSHERIHTGEKPYTCPFCKTSYRQSSTYHRHMRTHEKITLPSVPSTPEAS

SEQ ID NO: 16495 - protein, 496 aa, Homo sapiens
MAANCTSSWSLGESCNRPGLELPRSMASSETQLGNHDVDPEISHVNFRMFSCPKESDPIQALRKLTELCHLWLRPDLHTKEQILDMLVMEQFMISMPQELQVLVMMNGVQSCKDLEDLLRNNRRPKKWSVVTFHGKEYIVQDSDIEMAEAPSSVRDDLKDVSSQRASSVNQMRPGEGQAHRELQILPRVPALSRRQGEDFLLHKSIDVTGDPKSLRPKQTLEKDLKENREENPGLTSPEPQLPKSPTDLVRAKEGKDPPKIASVENVDADTPSACVVEREASTHSGNRGDALNLSSPKRSKPDASSISQEEPQGEATPVGNRESPGQAGMNSIHSPGPASPVSHPDGQEAKALPPFACDVCEKRFTCNSKLVIHKRSHTGERLFQCNLCGKRFMQLISLQFHQRTHTGERPYTCDVCQKQFTQKSYLKCHKRSHTGEKPFECKDCKKVFTYRGSLKEHQRIHSGEKPYKCSKCPRAFSRLKLLRRHQKTHPEATSQ

SEQ ID NO: 16496 - protein, 495 aa, Homo sapiens
MAANWTLSWGQGGPCNSPGSDTPRSVASPETQLGNHDRNPETWHMNFRMFSCPEESDPIQALRKLTELCHLWLRPDLHTKEQILDMLVMEQFMISMPQELQVLVKVNGVQSCKDLEDLLRNNRRPKKWSIVNLLGKEYLMLNSDVEMAEAPASVRDDPRDVSSQWASSVNQMHPGTGQARREQQILPRVAALSRRQGEDFLLHKSIDVTGDPNSPRPKQTLEKDLKENREENPGLSSPEPQLPKSPNLVRAKEGKEPQKRASVENVDADTPSACVVEREALTHSGNRGDALNLSSPKRSKPDASSISQEEPQGEATPVGNRESPGQAEINPVHSPGPAGPVSHPDGQEAKALPPFACDVCNKSFKYFSQLSIHRRSHTGDRPFQCDLCRKRFLQPSDLRVHQRVHTGERPYMCDVCQKRFAHESTLQGHKRIHTGERPFKCKYCSKVFSHKGNLNVHQRTHSGEKPYKCPTCQKAFRQLGTFKRHLKTHRETTSQ

SEQ ID NO: 16497 - protein, 496 aa, Homo sapiens
MAANCTSSWSLGESCNSPGSEPPQSMPSPATQLGNHDSDPETCHVNFRMFSCPKESDPIQALRKLTELCHLWLRPDLHTKEQILDMLVMEQFMISMPQELQVLVMMNGVQSCKDLEDLLRNNRRPKKWSVVSFLGKEYLMQESDVEMAEAPASVRDDPRHVSSQRTSSVNQMCPEEGQASQELQTLPRVPALFRRQEEDFLLPETTVMKGDPKALRPKPTLEKDLEEDREENPGLTSPEPQLPNSPTGVVGAKEGKEPQKRASVENVDADTPSACVVEREASTHSGSRGDALNLRGLKRSKPDATSISQEEPQGEATPVGNRESPGQAEINPVHSPGPAGPVSHPSGQEVKELLPFACEVCGKRFKYRGKLAVHTRSHTGERLFQCNLCGKRFMQRIGLQFHQRTHTGERPYTCDICQKQFTQKSYLKCHKRSHTGEKPFECKDCKKVFTYKANLKEHQRIHSGEKPHKCSKCPRAFGRPATLRRHQKTHREATSQ

SEQ ID NO: 16498 - protein, 394 aa, Homo sapiens
MNTNSKEVLSLGVQVPEAWEELLTMKVEAKSHLQWQESRLKRSNPLAREIFRRHFRQLCYQETPGPREALTRLQELCYQWLRPHVSTKEQILDLLVLEQFLSILPKELQGWVREHCPESGEEAVILLEDLERELDEPQHEMVAHRHRQEVLCKEMVPLAEQTPLTLQSQPKEPQLTCDSAQKCHSIGETDEVTKTEDRELVLRKDCPKIVEPHGKMFNEQTWEVSQQDPSHGEVGEHKDRIERQWGNLLGEGQHKCDECGKSFTQSSGLIRHQRIHTGERPYECNECGKAFSRSSGLFNHRGIHNIQKRYHCKECGKVFSQSAGLIQHQRIHKGEKPYQCSQCSKSYSRRSFLIEHQRSHTGERPHQCIECGKSFNRHCNLIRHQKIHTVAELV

SEQ ID NO: 16499 - protein, 578 aa, Homo sapiens
MLSCNICGETVTSEPDMKAHLIVHMESEIICPFCKLSGVNYDEMCFHIETAHFEQNTLERNFERINTVQYGTSDNKKDNTLQCGMEVNSSILSGCASNHPKNSAQNLTKDSTLKHEGFYSENLTESRKFLKSREKQSSLTEIKGSVYETTYSPPECPFCGKIEEHSEDMETHVKTKHANLLDIPLEDCDQPLYDCPMCGLICTNYHILQEHVDLHLEENSFQQGMDRVQCSGDLQLAHQLQQEEDRKRRSEESRQEIEEFQKLQRQYGLDNSGGYKQQQLRNMEIEVNRGRMPPSEFHRRKADMMESLALGFDDGKTKTSGIIEALHRYYQNAATDVRRVWLSSVVDHFHSSLGDKGWGCGYRNFQMLLSSLLQNDAYNDCLKGMLIPCIPKIQSMIEDAWKEGFDPQGASQLNNRLQGTKAWIGACEVYILLTSLRVKCHIVDFHKSTGPLGTHPRLFEWILNYYSSEGEGSPKVVCTSKPPIYLQHQGHSRTVIGIEEKKNRTLCLLILDPGCPSREMQKLLKQDIEASSLKQLRKSMGNLKHKQYQILAVEGALSLEEKLARRQASQVFTAEKIP

SEQ ID NO: 16500 - protein, 799 aa, Homo sapiens
MEIPKLLPARGTLQGGGGGGIPAGGGRVHRGPDSPAGQVPTRRLLLPRGPQDGGPGRRREEASTASRGPGPSLFAPRPHQPSGGGDDFFLVLLDPVGGDVETAGSGQAAGPVLREEAKAGPGLQGDESGANPAGCSAQGPHCLSAVPTPAPISAPGPAAAFAGTVTIHNQDLLLRFENGVLTLATPPPHAWEPGAAPAQQPRCLIAPQAGFPQAAHPGDCPELRSDLLLAEPAEPAPAPAPQEEAEGLAAALGPRGLLGSGPGVVLYLCPEALCGQTFAKKHQLKMHLLTHSSSQGQRPFKCPLGGCGWTFTTSYKLKRHLQSHDKLRPFGCPAEGCGKSFTTVYNLKAHMKGHEQENSFKCEVCEESFPTQAKLGAHQRSHFEPERPYQCAFSGCKKTFITVSALFSHNRAHFREQELFSCSFPGCSKQYDKACRLKIHLRSHTGERPFLCDFDGCGWNFTSMSKLLRHKRKHDDDRRFMCPVEGCGKSFTRAEHLKGHSITHLGTKPFVCPVAGCCARFSARSSLYIHSKKHLQDVDTWKSRCPISSCNKLFTSKHSMKTHMVKRHKVGQDLLAQLEAANSLTPSSELTSQRQNDLSDAEIVSLFSDVPDSTSAALLDTALVNSGILTIDVASVSSTLAGHLPANNNNSVGQAVDPPSLMATSDPPQSLDTSLFFGTAATGFQQSSLNMDEVSSVSVGPLGSLDSLAMKNSSPEPQALTPSSKLTVDTDTLTPSSTLCENSVSELLTPAKAEWSVHPNSDFFGQEGETQFGFPNAAGNHGSQKERNLITVTGSSFLV

SEQ ID NO: 16501 - protein, 803 aa, Homo sapiens
MEIPKLLPARGTLQGGGGGGIPAGGGRVHRGPDSPAGQVPTRRLLLLRGPQDGGPGRRREEASTASRGPGPSLLAPRTDQPSGGGGGGGDDFFLVLLDPVGGDVETAGSGQAAGPVLREEAEEGPGLQGGESGANPAGPTALGPRCLSAVPTPAPISAPGPAAAFAGTVTIHNQDLLLRFENGVLTLATPPPHAWEPGAAPAQQPGCLIAPQAGFPHAAHPGDCPELPPDLLLAEPAEPAPAPAPEEEAEGPAAALGPRGPLGSGPGVVLYLCPEAQCGQTFAKKHQLKVHLLTHSSSQGQRPFKCPLGGCGWTFTTSYKLKRHLQSHDKLRPFGCPAEGCGKSFTTVYNLKAHMKGHEQENSFKCEVCEESFPTQAKLSAHQRSHFEPERPYQCAFSGCKKTFITVSALFSHNRAHFREQELFSCSFPGCSKQYDKACRLKIHLRSHTGERPFLCDFDGCGWNFTSMSKLLRHKRKHDDDRRFMCPVEGCGKSFTRAEHLKGHSITHLGTKPFVCPVAGCCARFSARSSLYIHSKKHLQDVDTWKSRCPISSCNKLFTSKHSMKTHMVKRHKVGQDLLAQLEAANSLTPSSELTSQRQNDLSDAEIVSLFSDVPDSTSAALLDTALVNSGILTIDVASVSSTLAGHLPANNNNSVGQAVDPPSLMATSDPPQSLDTSLFFGTAATGFQQSSLNMDEVSSVSVGPLGSLDSLAMKNSSPEPQALTPSSKLTVDTDALTPSSTLCENSVSELLTPTKAEWNVHPDSDFFGQEGETQFGFPNAAGNHGSQKETDLITVTGSSFLV

SEQ ID NO: 16502 - protein, 858 aa, Homo sapiens
MDLPALLPAPTARGGQHGGGPGPLRRAPAPLGASPARRRLLLVRGPEDGGPGARPGEASGPSPPPAEDDSDGDSFLVLLEVPHGGAAAEAAGSQEAEPGSRVNLASRPEQGPSGPAAPPGPGVAPAGAVTISSQDLLVRLDRGVLALSAPPGPATAGAAAPRRAPQASGPSTPGYRCPEPQCALAFAKKHQLKVHLLTHGGGQGRRPFKCPLEGCGWAFTTSYKLKRHLQSHDKLRPFGCPVGGCGKKFTTVYNLKAHMKGHEQESLFKCEVCAERFPTHAKLSSHQRSHFEPERPYKCDFPGCEKTFITVSALFSHNRAHFREQELFSCSFPGCSKQYDKACRLKIHLRSHTGERPFICDSDSCGWTFTSMSKLLRHRRKHDDDRRFTCPVEGCGKSFTRAEHLKGHSITHLGTKPFECPVEGCCARFSARSSLYIHSKKHVQDVGAPKSRCPVSTCNRLFTSKHSMKAHMVRQHSRRQDLLPQLEAPSSLTPSSELSSPGQSELTNMDLAALFSDTPANASGSAGGSDEALNSGILTIDVTSVSSSLGGNLPANNSSLGPMEPLVLVAHSDIPPSLDSPLVLGTAATVLQQGSFSVDDVQTVSAGALGCLVALPMKNLSDDPLALTSNSNLAAHITTPTSSSTPRENASVPELLAPIKVEPDSPSRPGAVGQQEGSHGLPQSTLPSPAEQHGAQDTELSAGTGNFYLESGGSARTDYRAIQLAKEKKQRGAGSNAGASQSTQRKIKEGKMSPPHFHASQNSWLCGSLVVPSGGRPGPAPAAGVQCGAQGVQVQLVQDDPSGEGVLPSARGPATFLPFLTVDLPVYVLQEVLPSSGGPAGPEATQFPGSTINLQDLQ

SEQ ID NO: 16503 - protein, 903 aa, Homo sapiens
MAASRSTRVTRSTVGLNGLDESFCGRTLRNRSIAHPEEISSNSQVRSRSPKKRPEPVPIQKGNNNGRTTDLKQQSTRESWVSPRKRGLSSSEKDNIERQAIENCERRQTEPVSPVLKRIKRCLRSEAPNSSEEDSPIKSDKESVEQRSTVVDNDADFQGTKRACRCLILDDCEKREIKKVNVSEEGPLNSAVVEEITGYLAVNGVDDSDSAVINCDDCQPDGNTKQNSIGSYVLQEKSVAENGDTDTQTSMFLDSRKEDSYIDHKVPCTDSQVQVKLEDHKIVTACLPVEHVNQLTTEPATGPFSETQSSLRDSEEEVDVVGDSSASKEQCKENTNNELDTSLESMPASGEPEPSPVLDCVSAQMMSLSEPQEHRYTLRTSPRRAAPTRGSPTKNSSPYRENGQFEENNLSPNETNATVSDNVSQSPTNPGEISQNEKGICCDSQNNGSEGVSKPPSEARLNIGHLPSAKESASQHITEEEDDDPDVYYFESDHVALKHNKDYQRLLQTIAVLEAQRSQAVQDLESLGRHQREALKNPIGFVEKLQKKADIGLPYPQRVVQLPEIVWDQYTHSLGNFEREFKNRKRHTRRVKLVFDKVGLPARPKSPLDPKKDGESLSYSMLPLSDGPEGSSSRPQMIRGRLCDDTKPETFNQLWTVEEQKKLEQLLIKYPPEEVESRRWQKIADELGNRTAKQVASRVQKYFIKLTKAGIPVPGRTPNLYIYSKKSSTSRRQHPLNKHLFKPSTFMTSHEPPVYMDEDDDRSCFHSHMNTAVEDASDDESIPIMYRNLPEYKELLQFKKLKKQKLQQMQAESGFVQHVGFKCDNCGIEPIQGVRWHCQDCPPEMSLDFCDSCSDCLHETDIHKEDHQLEPIYRSETFLDRDYCVSQGTSYNYLDPNYFPANR

SEQ ID NO: 16504 - protein, 455 aa, Homo sapiens; identical to SEQ ID NO: 13589

SEQ ID NO: 16505 - protein, 461 aa, Homo sapiens; identical to SEQ ID NO: 13591

SEQ ID NO: 16506 - protein, 417 aa, Homo sapiens; identical to SEQ ID NO: 13599

SEQ ID NO: 16507 - protein, 655 aa, Homo sapiens
MGTSPSSSTALASCSRIARRATATMIAGSLLLLGFLSTTTAQPEQKASNLIGTYRHVDRATGQVLTCDKCPAGTYVSEHCTNTSLRVCSSCPVGTFTRHENGIEKCHDCSQPCPWPMIEKLPCAALTDRECTCPPGMFQSNATCAPHTVCPVGWGVRKKGTETEDVRCKQCARGTFSDVPSSVMKCKAYTDCLSQNLVVIKPGTKETDNVCGTLPSFSSSTSPSPGTAIFPRPEHMETHEVPSSTYVPKGMNSTESNSSASVRPKVLSSIQEGTVPDNTSSARGKEDVNKTLPNLQVVNHQQGPHHRHILKLLPSMEATGGEKSSTPIKGPKRGHPRQNLHKHFDINEHLPWMIVLFLLLVLVVIVVCSIRKSSRTLKKGPRQDPSAIVEKAGLKKSMTPTQNREKWIYYCNGHGIDILKLVAAQVGSQWKDIYQFLCNASEREVAAFSNGYTADHERAYAALQHWTIRGPEASLAQLISALRQHRRNDVVEKIRGLMEDTTQLETDKLALPMSPSPLSPSPIPSPNAKLENSALLTVEPSPQDKNKGFFVDESEPLLRCDSTSSGSSALSRNGSFITKEKKDTVLRQVRLDPCDLQPIFDDMLHFLNPEELRVIEEIPQAEDKLDRLFEIIGVKSQEASQTLLDSVYSHLPDLL

SEQ ID NO: 16508 - protein, 335 aa, Homo sapiens; identical to SEQ ID NO: 5109

SEQ ID NO: 16509 - protein, 2511 aa, Homo sapiens
MEEVVIAGMSGKLPESENLQEFWDNLIGGVDMVTDDDRRWKAGLYGLPRRSGKLKDLSRFDASFFGVHPKQAHTMDPQLRLLLEVTYEAIVDGGINPDSLRGTHTGVWVGVSGSETSEALSRDPETLVGYSMVGCQRAMMANRLSFFFDFRGPSIALDTACSSSLMALQNAYQAIHSGQCPAAIVGGINVLLKPNTSVQFLRLGMLSPEGTCKAFDTAGNGYCRSEGVVAVLLTKKSLARRVYATILNAGTNTDGFKEQGVTFPSGDIQEQLIRSLYQSAGVAPESFEYIEAHGTGTKVGDPQELNGITRALCATRQEPLLIGSTKSNMGHPEPASGLAALAKVLLSLEHGLWAPNLHFHSPNPEIPALLDGRLQVVDQPLPVRGGNVGINSFGFGGSNVHIILRPNTQPPPAPAPHATLPRLLRASGRTPEAVQKLLEQGLRHSQDLAFLSMLNDIAAVPATAMPFRGYAVLGGERGGPEVQQVPAGERPLWFICSGMGTQWRGMGLSLMRLDRFRDSILRSDEAVKPFGLKVSQLLLSTDESTFDDIVHSFVSLTAIQIGLIDLLSCMGLRPDGIVGHSLGEVACGYADGCLSQEEAVLAAYWRGQCIKEAHLPPGAMAAVGLSWEECKQRCPPGVVPACHNSKDTVTISGPQAPVFEFVEQLRKEGVFAKEVRTGGMAFHSYFMEAIAPPLLQELKKVIREPKPRSARWLSTSIPEAQWHSSLARTSSAEYNVNNLVSPVLFQEALWHVPEHAVVLEIAPHALLQAVLKRGLKPSCTIIPLMKKDHRDNLEFFLAGIGRLHLSGIDANPNALFPPVEFPAPRGTPLISPLIKWDHSLAWDVPAAEDFPNGSGSPSAAIYNIDTSSESPDHYLVDHTLDGRVLFPATGYLSIVWKTLARALGLGVEQLPVVFEDVVLHQATILPKTGTVSLEVRLLEASRAFEVSENGNLVVSGKVYQWDDPDPRLFDHPESPTPNPTEPLFLAQAEVYKELRLRGYDYGPHFQGILEASLEGDSGRLLWKDNWVSFMDTMLQMSILGSAKHGLYLPTRVTAIHIDPATHRQKLYTLQDKAQVADVVVSRWLRVTVAGGVHISGLHTESAPRRQQEQQVPILEKFCFTPHTEEGCLSERAALQEELQLCKGLVQALQTKVTQQGLKMVVPGLDGAQIPRDPSQQELPRLLSAACRLQLNGNLQLELAQVLAQERPKLPEDPLLSGLLDSPALKACLDTAVENMPSLKMKVVEVLAGHGHLYSRIPGLLSPHPLLQLSYTATDRHPQALEAAQAELQQHDVAQGQWDPADPAPSALGSADLLVCNCAVAALGDPASALSNMVAALREGGFLLLHTLLRGHPLGDIVAFLTSTEPQYGQGILSQDAWESLFSRVSLRLVGLKKSFYGSTLFLCRRPTPQDSPIFLPVDDTSFRWVESLKGILADEDSSRPVWLKAINCATSGVVGLVNCLRREPGGNRLRCVLLSNLSSTSHVPEVDPGSAELQKVLQGDLVMNVYRDGAWGAFRHFLLEEDKPEEPTAHAFVSTLTRGDLSSIRWVCSSLRHAQPTCPGAQLCTVYYASLNFRDIMLATGKLSPDAIPGKWTSQDSLLGMEFSGRDASGKRVMGLVPAKGLATSVLLSPDFLWDVPSNWTLEEAASVPVVYSTAYYALVVRGRVRPGETLLIHSGSGGVGQAAIAIALSLGCRVFTTVGSAEKRAYLQARFPQLDSTSFANSRDTSFEQHVLWHTGGKGVDLVLNSLAEEKLQASVRCLATHGRFLEIGKFDLSQNHPLGMAIFLKNVTFHGVLLDAFFNESSADWREVWALVQAGIRDGVVRPLKCTVFHGAQVEDAFRYMAQGKHIGKVVVQVLAEEPEAVLKGAKPKLMSAISKTFCPAHKSYIIAGGLGGFGLELAQWLIQRGVQKLVLTSRSGIRTGYQAKQVRRWRRQGVQVQVSTSNISSLEGARGLIAEAAQLGPVGGVFNLAVVLRDGLLENQTPEFFQDVCKPKYSGTLNLDRVTREACPELDYFVVFSSVSCGRGNAGQSNYGFANSAMERICEKRRHEGLPGLAVQWGAIGDVGILVETMSTNDTIVSGTLPQRMASCLEVLDLFLNQPHMVLSSFVLAEKAAAYRDRDSQRDLVEAVAHILGIRDLAAVNLDSSLADLGLDSLMSVEVRQTLERELNLVLSVREVRQLTLRKLQELSSKADEASELACPTPKEDGLAQQQTQLNLRSLLVNPEGPTLMRLNSVQSSERPLFLVHPIEGSTTVFHSLASRLSIPTYGLQCTRAAPLDSIHSLAAYYIDCIRQVQPEGPYRVAGYSYGACVAFEMCSQLQAQQSPAPTHNSLFLFDGSPTYVLAYTQSYRAKLTPGCEAEAETEAICFFVQQFTDMEHNRVLEALLPLKGLEERVAAAVDLIIKSHQGLDRQELSFAARSFYYKLRAAEQYTPKAKYHGNVMLLRAKTGGAYGEDLGADYNLSQVCDGKVSVHVIEGDHRTLLEGSGLESIISIIHSSLAEPRVSVREG

SEQ ID NO: 16510 - protein, 281 aa, Homo sapiens
MQQPFNYPYPQIYWVDSSASSPWAPPGTVLPCPTSVPRRPGQRRPPPPPPPPPLPPPPPPPPLPPLPLPPLKKRGNHSTGLCLLVMFFMVLVALVGLGLGMFQLFHLQKELAELRESTSQMHTASSLEKQIGHPSPPPEKKELRKVAHLTGKSNSRSMPLEWEDTYGIVLLSGVKYKKGGLVINETGLYFVYSKVYFRGQSCNNLPLSHKVYMRNSKYPQDLVMMEGKMMSYCTTGQMWARSSYLGAVFNLTSADHLYVNVSELSLVNFEESQTFFGLYKL

SEQ ID NO: 16511 - protein, 393 aa, Homo sapiens [sequence omitted]

SEQ ID NO: 16512 - protein, 455 aa, Homo sapiens; identical to SEQ ID NO: 13589

SEQ ID NO: 16513 - protein, 461 aa, Homo sapiens; identical to SEQ ID NO: 13591

SEQ ID NO: 16514 - protein, 468 aa, Homo sapiens
MAPPPARVHLGAFLAVTPNPGSAASGTEAAAATPSKVWGSSAGRIEPRGGGRGALPTSMGQHGPSARARAGRAPGPRPAREASPRLRVHKTFKFVVVGVLLQVVPSSAATIKLHDQSIGTQQWEHSPLGELCPPGSHRSEHPGACNRCTEGVGYTNASNNLFACLPCTACKSDEEERSPCTTTRNTACQCKPGTFRNDNSAEMCRKCSRGCPRGMVKVKDCTPWSDIECVHKESGNGHNIWVILVVTLVVPLLLVAVLIVCCCIGSGCGGDPKCMDRVCFWRLGLLRGPGAEDNAHNEILSNADSLSTFVSEQQMESQEPADLTGVTVQSPGEAQCLLGPAEAEGSQRRRLLVPANGADPTETLMLFFDKFANIVPFDSWDQLMRQLDLTKNEIDVVRAGTAGPGDALYAMLMKWVNKTGRNASIHTLLDALERMEERHAREKIQDLLVDSGKFIYLEDGTGSAVSLE

SEQ ID NO: 16515 - protein, 440 aa, Homo sapiens
MEQRGQNAPAASGARKRHGPGPREARGARPGPRVPKTLVLVVAAVLLLVSAESALITQQDLAPQQRAAPQQKRSSPSEGLCPPGHHISEDGRDCISCKYGQDYSTHWNDLLFCLRCTRCDSGEVELSPCTTTRNTVCQCEEGTFREEDSPEMCRKCRTGCPRGMVKVGDCTPWSDIECVHKESGTKHSGEVPAVEETVTSSPGTPASPCSLSGIIIGVTVAAVVLIVAVFVCKSLLWKKVLPYLKGICSGGGGDPERVDRSSQRPGAEDNVLNEIVSILQPTQVPEQEMEVQEPAEPTGVNMLSPGESEHLLEPAEAERSQRRRLLVPANEGDPTETLRQCFDDFADLVPFDSWEPLMRKLGLMDNEIKVAKAEAAGHRDTLYTMLIKWVNKTGRDASVHTLLDALETLGERLAKQKIEDHLLSSGKFMYLEGNADSAMS

SEQ ID NO: 16516 - protein, 208 aa, Homo sapiens
MDPFLVLLHSVSSSLSSSELTELKFLCLGRVGKRKLERVQSGLDLFSMLLEQNDLEPGHTELLRELLASLRRHDLLRRVDDFEAGAAAGAAPGEEDLCAAFNVICDNVGKDWRRLARQLKVSDTKIDSIEDRYPRNLTERVRESLRIWKNTEKENATVAHLVGALRSCQMNLVADLVQEVQQARDLQNRSGAMSPMSWNSDASTSEAS

SEQ ID NO: 16517 - protein, 312 aa, Homo sapiens
MAAGQNGHEEWVGSAYLFVESSLDKVVLSDAYAHPQQKVAVYRALQAALAESGGSPDVLQMLKIHRSDPQLIVQLRFCGRQPCGRFLRAYREGALRAALQRSLAAALAQHSVPLQLELRAGAERLDALLADEERCLSCILAQQPDRLRDEELAELEDALRNLKCGSGARGGDGEVASAPLQPPVPSLSEVKPPPPPPPAQTFLFQGQPVVNRPLSLKDQQTFARSVGLKWRKVGRSLQRGCRALRDPALDSLAYEYEREGLYEQAFQLLRRFVQAEGRRATLQRLVEALEENELTSLAEDLLGLTDPNGGLA

SEQ ID NO: 16518 - protein, 192 aa, Homo sapiens
MDGSGEQPRGGGPTSSEQIMKTGALLLQGFIQDRAGRMGGEAPELALDPVPQDASTKKLSECLKRIGDELDSNMELQRMIAAVDTDSPREVFFRVAADMFSDGNFNWGRVVALFYFASKLVLKALCTKVPELIRTIMGWTLDFLRERLLGWIQDQGGWDGLLSYFGTPTWQTVTIFVAGVLTASLTIWKKMG

SEQ ID NO: 16519 - protein, 211 aa, Homo sapiens
MASGQGPGPPRQECGEPALPSASEEQVAQDTEEVFRSYVFYRHQQEQEAEGVAAPADPEMVTLPLQPSSTMGQVGRQLAIIGDDINRRYDSEFQTMLQHLQPTAENAYEYFTKIATSLFESGINWGRVVALLGFGYRLALHVYQHGLTGFLGQVTRFVVDFMLHHCIARWIAQRGGWVAALNLGNGPILNVLVVLGVVLLGQFVVRRFFKS

SEQ ID NO: 16520 - protein, 246 aa, Homo sapiens
MTMDKSELVQKAKLAEQAERYDDMAAAMKAVTEQGHELSNEERNLLSVAYKNVVGARRSSWRVISSIEQKTERNEKKQQMGKEYREKIEAELQDICNDVLELLDKYLIPNATQPESKVFYLKMKGDYFRYLSEVASGDNKQTTVSNSQQAYQEAFEISKKEMQPTHPIRLGLALNFSVFYYEILNSPEKACSLAKTAFDEAIAELDTLNEESYKDSTLIMQLLRDNLTLWTSENQGDEGDAGEGEN

SEQ ID NO: 16521 - protein, 239 aa, Homo sapiens
MAHAGRTGYDNREIVMKYIHYKLSQRGYEWDAGDVGAAPPGAAPAPGIFSSQPGHTPHPAASRDPVARTSPLQTPAAPGAAAGPALSPVPPVVHLTLRQAGDDFSRRYRRDFAEMSSQLHLTPFTARGRFATVVEELFRDGVNWGRIVAFFEFGGVMCVESVNREMSPLVDNIALWMTEYLNRHLHTWIQDNGGWDAFVELYGPSMRPLFDFSWLSLKTLLSLALVGACITLGAYLGHK

SEQ ID NO: 16522 - protein, 105 aa, Homo sapiens
MGDVEKGKKIFIMKCSQCHTVEKGGKHKTGPNLHGLFGRKTGQAPGYSYTAANKNKGIIWGEDTLMEYLENPKKYIPGTKMIFVGIKKKEERADLIAYLKKATNE

SEQ ID NO: 16523 - protein, 239 aa, Homo sapiens
MAALKSWLSRSVTSFFRYRQCLCVPVVANFKKRCFSELIRPWHKTVTIGFGVTLCAVPIAQKSEPHSLSSEALMRRAVSLVTDSTSTFLSQTTYALIEAITEYTKAVYTLTSLYRQYTSLLGKMNSEEEDEVWQVIIGARAEMTSKHQEYLKLETTWMTAVGLSEMAAEAAYQTGADQASITARNHIQLVKLQVEEVHQLSRKAETKLAEAQIEELRQKTQEEGEERAESEQEAYLRED

SEQ ID NO: 16524 - protein, 422 aa, Homo sapiens
MALRGSHRLEVIFKRCIASPVLHSHAANRRSSQLAIKEGDPNSNGNSGQYQQNGEQKEKGWRRLVRFFVPFSLGAVVSAAIIQREDLTPTIAASKMTGRRRDFNFIADVVAGCADSVVYIEIKDTRHFDYFSGQPITASNGSGFIIEQNGLILTNAHVVINKPHTMVQVRLSDGRTFPATIEDVDQTSDLATLRIQVNNLSVMRLGKSSTLRSGEWVVALGSPLALSNTVTAGVISSTQRASQELGLRNRDINYLQTDAAITFGNSGGPLVNLDGEAIGVNSMKVTAGISFAIPIDYVKVFLERAAEKRKKGSAYKTGYPVKRYMGITMLTLTPDILFELKSRSQNMPSNLTHGVLVWKVIVGSPAHSGGLQPGDIVTHINKKEIKNSSDVYDALADNSKTLDIVILRGVKQMHVTITPEDP

SEQ ID NO: 16525 - protein, 613 aa, Homo sapiens
MFRCGGLAAGALKQKLVPLVRTVCVRSPRQRNRLPGNLFQRWHVPLELQMTRQMASSGASGGKIDNSVLVLIVGLSTVGAGAYAYKTMKEDEKRYNERISGLGLTPEQKQKKAALSASEGEEVPQDKAPSHVPFLLIGGGTAAFAAARSIRARDPGARVLIVSEDPELPYMRPPLSKELWFSDDPNVTKTLRFKQWNGKERSIYFQPPSFYVSAQDLPHIENGGVAVLTGKKVVQLDVRDNMVKLNDGSQITYEKCLIATGGTPRSLSAIDRAGAEVKSRTTLFRKIGDFRSLEKISREVKSITIIGGGFLGSELACALGRKARALGTEVIQLFPEKGNMGKILPEYLSNWTMEKVRREGVKVMPNAIVQSVGVSSGKLLIKLKDGRKVETDHIVAAVGLEPNVELAKTGGLEIDSDFGGFRVNAELQARSNIWVAGDAACFYDIKLGRRRVEHHDHAVVSGRLAGENMTGAAKPYWHQSMFWSDLGPDVGYEAIGLVDSSLPTVGVFAKATAQDNPKSATEQSGTGIRSESETESEASEITIPPSTPAVPQAPVQGEDYGKGVIFYLRDKVVVGIVLWNIFNRMPIARKIIKDGEQHEDLNEVAKLFNIHED

SEQ ID NO: 16526 - protein, 368 aa, Homo sapiens; identical to SEQ ID NO: 4940

SEQ ID NO: 16527 - protein, 416 aa, Homo sapiens
MDEADRRLLRRCRLRLVEELQVDQLWDALLSRELFRPHMIEDIQRAGSGSRRDQARQLIIDLETRGSQALPLFISCLEDTGQDMLASFLRTNRQAAKLSKPTLENLTPVVLRPEIRKPEVLRPETPRPVDIGSGGFGDVGALESLRGNADLAYILSMEPCGHCLIINNVNFCRESGLRTRTGSNIDCEKLRRRFSSLHFMVEVKGDLTAKKMVLALLELAQQDHGALDCCVVVILSHGCQASHLQFPGAVYGTDGCPVSVEKIVNIFNGTSCPSLGGKPKLFFIQACGGEQKDHGFEVASTSPEDESPGSNPEPDATPFQEGLRTFDQLDAISSLPTPSDIFVSYSTFPGFVSWRDPKSGSWYVETLDDIFEQWAHSEDLQSLLLRVANAVSVKGIYKQMPGCFNFLRKKLFFKTS

SEQ ID NO: 16528 - protein, 452 aa, Homo sapiens
MAAPSAGSWSTFQHKELMAADRGRRILGVCGMHPHHQETLKKNRVVLAKQLLLSELLEHLLEKDIITLEMRELIQAKVGSFSQNVELLNLLPKRGPQAFDAFCEALRETKQGHLEDMLLTTLSGLQHVLPPLSCDYDLSLPFPVCESCPLYKKLRLSTDTVEHSLDNKDGPVCLQVKPCTPEFYQTHFQLAYRLQSRPRGLALVLSNVHFTGEKELEFRSGGDVDHSTLVTLFKLLGYDVHVLCDQTAQEMQEKLQNFAQLPAHRVTDSCIVALLSHGVEGAIYGVDGKLLQLQEVFQLFDNANCPSLQNKPKMFFIQACRGDETDRGVDQQDGKNHAGSPGCEESDAGKEKLPKMRLPTRSDMICGYACLKGTAAMRNTKRGSWYIEALAQVFSERACDMHVADMLVKVNALIKDREGYAPGTEFHRCKEMSEYCSTLCRHLYLFPGHPPT

SEQ ID NO: 16529 - protein, 479 aa, Homo sapiens
MDFSRNLYDIGEQLDSEDLASLKFLSLDYIPQRKQEPIKDALMLFQRLQEKRMLEESNLSFLKELLFRINRLDLLITYLNTRKEEMERELQTPGRAQISAYRVMLYQISEEVSRSELRSFKFLLQEEISKCKLDDDMNLLDIFIEMEKRVILGEGKLDILKRVCAQINKSLLKIINDYEEFSKERSSSLEGSPDEFSNGEELCGVMTISDSPREQDSESQTLDKVYQMKSKPRGYCLIINNHNFAKAREKVPKLHSIRDRNGTHLDAGALTTTFEELHFEIKPHDDCTVEQIYEILKIYQLMDHSNMDCFICCILSHGDKGIIYGTDGQEAPIYELTSQFTGLKCPSLAGKPKVFFIQACQGDNYQKGIPVETDSEEQPYLEMDLSSPQTRYIPDEADFLLGMATVNNCVSYRNPAEGTWYIQSLCQSLRERCPRGDDILTILTEVNYEVSNKDDKKNMGKQMPQPTFTLRKKLVFPSD

SEQ ID NO: 16530 - protein, 521 aa, Homo sapiens
MKSQGQHWYSSSDKNCKVSFREKLLIIDSNLGVQDVENLKFLCIGLVPNKKLEKSSSASDVFEHLLAEDLLSEEDPFFLAELLYIIRQKKLLQHLNCTKEEVERLLPTRQRVSLFRNLLYELSEGIDSENLKDMIFLLKDSLPKTEMTSLSFLAFLEKQGKIDEDNLTCLEDLCKTVVPKLLRNIEKYKREKAIQIVTPPVDKEAESYQGEEELVSQTDVKTFLEALPQESWQNKHAGSNGNRATNGAPSLVSRGMQGASANTLNSETSTKRAAVYRMNRNHRGLCVIVNNHSFTSLKDRQGTHKDAEILSHVFQWLGFTVHIHNNVTKVEMEMVLQKQKCNPAHADGDCFVFCILTHGRFGAVYSSDEALIPIREIMSHFTALQCPRLAEKPKLFFIQACQGEEIQPSVSIEADALNPEQAPTSLQDSIPAEADFLLGLATVPGYVSFRHVEEGSWYIQSLCNHLKKLVPRMLKFLEKTMEIRGRKRTVWGAKQISATSLPTAISAQTPRPPMRRWSSVS

SEQ ID NO: 16531 - protein, 277 aa, Homo sapiens
MENTENSVDSKSIKNLEPKIIHGSESMDSGISLDNSYKMDYPEMGLCIIINNKNFHKSTGMTSRSGTDVDAANLRETFRNLKYEVRNKNDLTREEIVELMRDVSKEDHSKRSSFVCVLLSHGEEGIIFGTNGPVDLKKITNFFRGDRCRSLTGKPKLFIIQACRGTELDCGIETDSGVDDDMACHKIPVEADFLYAYSTAPGYYSWRNSKDGSWFIQSLCAMLKQYADKLEFMHILTRVNRKVATEFESFSFDATFHAKKQIPCIVSMLTKELYFYH

SEQ ID NO: 16532 - protein, 293 aa, Homo sapiens
MSSASGLRRGHPAGGEENMTETDAFYKREMFDPAEKYKMDHRRRGIALIFNHERFFWHLTLPERRGTCADRDNLTRRFSDLGFEVKCFNDLKAEELLLKIHEVSTVSHADADCFVCVFLSHGEGNHIYAYDAKIEIQTLTGLFKGDKCHSLVGKPKIFIIQACRGNQHDVPVIPLDVVDNQTEKLDTNITEVDAASVYTLPAGADFLMCYSVAEGYYSHRETVNGSWYIQDLCEMLGKYGSSLEFTELLTLVNRKVSQRRVDFCKDPSAIGKKQVPCFASMLTKKLHFFPKSN

SEQ ID NO: 16533 - protein, 303 aa, Homo sapiens
MADDQGCIEEQGVEDSANEDSVDAKPDRSSFVPSLFSKKKKNVTMRSIKTTRDRVPTYQYNMNFEKLGKCIIINNKNFDKVTGMGVRNGTDKDAEALFKCFRSLGFDVIVYNDCSCAKMQDLLKKASEEDHTNAACFACILLSHGEENVIYGKDGVTPIKDLTAHFRGDRCKTLLEKPKLFFIQACRGTELDDGIQADSGPINDTDANPRYKIPVEADFLFAYSTVPGYYSWRSPGRGSWFVQALCSILEEHGKDLEIMQILTRVNDRVARHFESQSDDPHFHEKKQIPCVVSMLTKELYFSQ

SEQ ID NO: 16534 - protein, 233 aa, Homo sapiens
MSTESMIRDVELAEEALPKKTGGPQGSRRCLFLSLFSFLIVAGATTLFCLLHFGVIGPQREEFPRDLSLISPLAQAVRSSSRTPSDKPVAHVVANPQAEGQLQWLNRRANALLANGVELRDNQLVVPSEGLYLIYSQVLFKGQGCPSTHVLLTHTISRIAVSYQTKVNLLSAIKSPCQRETPEGAEAKPWYEPIYLGGVFQLEKGDRLSAEINRPDYLDFAESGQVYFGIIAL

SEQ ID NO: 16535 - protein, 249 aa, Homo sapiens; identical to SEQ ID NO: 13611

SEQ ID NO: 16536 - protein, 129 aa, Homo sapiens; identical to SEQ ID NO: 13567

SEQ ID NO: 16537 - protein, 281 aa, Homo sapiens [sequence omitted]

SEQ ID NO: 16538 - protein, 251 aa, Homo sapiens; identical to SEQ ID NO: 13613

SEQ ID NO: 16539 - protein, 671 aa, Homo sapiens
MQPDMSLNVIKMKSSDFLESAELDSGGFGKVSLCFHRTQGLMIMKTVYKGPNCIEHNEALLEEAKMMNRLRHSRVVKLLGVIIEEGKYSLVMEYMEKGNLMHVLKAEMSTPLSVKGRIILEIIEGMCYLHGKGVIHKDLKPENILVDNDFHIKIADLGLASFKMWSKLNNEEHNELREVDGTAKKNGGTLYYMAPEHLNDVNAKPTEKSDVYSFAVVLWAIFANKEPYENAICEQQLIMCIKSGNRPDVDDITEYCPREIISLMKLCWEANPEARPTFPGIEEKFRPFYLSQLEESVEEDVKSLKKEYSNENAVVKRMQSLQLDCVAVPSSRSNSATEQPGSLHSSQGLGMGPVEESWFAPSLEHPQEENEPSLQSKLQDEANYHLYGSRMDRQTKQQPRQNVAYNREEERRRRVSHDPFAQQRPYENFQNTEGKGTAYSSAASHGNAVHQPSGLTSQPQVLYQNNGLYSSHGFGTRPLDPGTAGPRVWYRPIPSHMPSLHNIPVPETNYLGNTPTMPFSSLPPTDESIKYTIYNSTGIQIGAYNYMEIGGTSSSLLDSTNTNFKEEPAAKYQAIFDNTTSLTDKHLDPIRENLGKHWKNCARKLGFTQSQIDEIDHDYERDGLKEKVYQMLQKWVMREGIKGATVGKLAQALHQCSRIDLLSSLIYVSQN

SEQ ID NO: 16540 - protein, 616 aa, Homo sapiens
MEILQNSPFLRGLCRTSAPADLQYDNTSELFRISTFAKFPSTAPVTERSLARAGFFYTGICDRVQCFRCNVTIDNWQTGECPAERHKQMSPNCAFIQSLPSTANLLSSSHSAFSPLRNATILQLNLPAVTSASGQTDEQVGYLNMSNLAPSSPLSSRGVEDMSHQRPSACHNPSMRREQDRLDTFQNWTLTTITPAELAKAGFYYLSQGDRVACFSCGGHLSNWEPGDRAMSEHQRHYPNCRFVRGDRADNISIAGGLANVSNPAMQQCEERLLTFVNWPARIPVRPDQLAKAGFYYVGRNDDVKCFCCDGGLRCWESGDDPWVEHAKWFPRCEYLLQEKGQEFVHQIQARFPRLFEQLLNNGDSREFVDPPVVHLGPGEERSEDAVMMNTPVVKAALEMGFDRNLVKQTVQSKILTSGENYKTVQELVSDLLSAEDEKREEEREMFAEEMASDGFTFLKKHHAALTQRLKSVQSLMDHLLEENVISQKEYDTIRNCTSVKQQTGQLIDLVLSKGNAAAEVFRNWIKKNDVYLLRELMAQTNEAVSPSQDLSDLPMEEQLRRLQEERTCKVCMDKEVNIVFIPCGHLVVCKECAPSLRKCPICRGMVKGTVRTFLS

SEQ ID NO: 16541 - protein, 501 aa, Homo sapiens
MAAASVTPPGSLELLQPGFSKTLLGTKLEAKYLCSACRNVLRRPFQAQCGHRYCSFCLASILSSGPQNCAACVHEGIYEEGISILESSSAFPDNAARREVESLPAVCPSDGCTWKGTLKEYESCHEGRCPLMLTECPACKGLVRLGEKERHLEHECPERSLSCRHCRAPCCGADVKAHHEVCPKFPLTCDGCGKKKIPREKFQDHVKTCGKCRVPCRFHAIGCLETVEGEKQQEHEVQWLREHLAMLLSSVLEAKPLLGDQSHAGSELLQRCESLEKKTATFENIVCVLNREVERVAMTAEACSRQHRLDQDKIEALSSKVQQLERSIGLKDLAMADLEQKVLEMEASTYDGVFIWKISDFARKRQEAVAGRIPAIFSPAFYTSRYGYKMCLRIYLNGDGTGRGTHLSLFFVVMKGPNDALLRWPFNQKVTLMLLDQNNREHVIDAFRPDVTSSSFQRPVNDMNIASGCPLFCPVSKMEAKNSYVRDDAIFIKAIVDLTGL

SEQ ID NO: 16542 - protein, 826 aa, Homo sapiens; identical to SEQ ID NO: 15084

SEQ ID NO: 16543 - protein, 213 aa, Homo sapiens
MPRRAENWDEAEVGAEEAGVEEYGPEEDGGEESGAEESGPEESGPEELGAEEEMEAGRPRPVLRSVNSREPSQVIFCNRSPRVVLPVWLNFDGEPQPYPTLPPGTGRRIHSYRGHLWLFRDAGTHDGLLVNQTELFVPSLNVDGQPIFANITLPVYTLKERCLQVVRSLVKPENYRRLDIVRSLYEDLEDHPNVQKDLERLTQERIAHQRMGD

SEQ ID NO: 16544 - protein, 492 aa, Homo sapiens
MEPSSKKLTGRLMLAVGGAVLGSLQFGYNTGVINAPQKVIEEFYNQTWVHRYGESILPTTLTTLWSLSVAIFSVGGMIGSFSVGLFVNRFGRRNSMLMMNLLAFVSAVLMGFSKLGKSFEMLILGRFIIGVYCGLTTGFVPMYVGEVSPTALRGALGTLHQLGIVVGILIAQVFGLDSIMGNKDLWPLLLSIIFIPALLQCIVLPFCPESPRFLLINRNEENRAKSVLKKLRGTADVTHDLQEMKEESRQMMREKKVTILELFRSPAYRQPILIAVVLQLSQQLSGINAVFYYSTSIFEKAGVQQPVYATIGSGIVNTAFTVVSLFVVERAGRRTLHLIGLAGMAGCAILMTIALALLEQLPWMSYLSIVAIFGFVAFFEVGPGPIPWFIVAELFSQGPRPAAIAVAGFSNWTSNFIVGMCFQYVEQLCGPYVFIIFTVLLVLFFIFTYFKVPETKGRTFDEIASGFRQGGASQSDKTPEELFHPLGADSQV

SEQ ID NO: 16545 - protein, 262 aa, Homo sapiens; identical to SEQ ID NO: 7713

SEQ ID NO: 16546 - protein, 630 aa, Homo sapiens
MELQPPEASIAVVSIPRQLPGSHSEAGVQGLSAGDDSELGSHCVAQTGLELLASGDPLPSASQNAEMIETGSDCVTQAGLQLLASSDPPALASKNAEVTGTMSQDTEVDMKEVELNELEPEKQPMNAASGAAMSLAGAEKNGLVKIKVAEDEAEAAAAAKFTGLSKEELLKVAGSPGWVRTRWALLLLFWLGWLGMLAGAVVIIVRAPRCRELPAQKWWHTGALYRIGDLQAFQGHGAGNLAGLKGRLDYLSSLKVKGLVLGPIHKNQKDDVAQTDLLQIDPNFGSKEDFDSLLQSAKKKSIRVILDLTPNYRGENSWFSTQVDTVATKVKDALEFWLQAGVDGFQVRDIENLKDASSFLAEWQNITKGFSEDRLLIAGTNSSDLQQILSLLESNKDLLLTSSYLSDSGSTGEHTKSLVTQYLNATGNRWCSWSLSQARLLTSFLPAQLLRLYQLMLFTLPGTPVFSYGDEIGLDAAALPGQPMEAPVMLWDESSFPDIPGAVSANMTVKGQSEDPGSLLSLFRRLSDQRSKERSLLHGDFHAFSAGPGLFSYIRHWDQNERFLVVLNFGDVGLSAGLQASDLPASASLPAKADLLLSTQPGREEGSPLELERLKLEPHEGLLLRFPYAA

SEQ ID NO: 16547 - protein, 541 aa, Homo sapiens
MVADPPRDSKGLAAAEPTANGGLALASIEDQGAAAGGYCGSRDQVRRCLRANLLVLLTVVAVVAGVALGLGVSGAGGALALGPERLSAFVFPGELLLRLLRMIILPLVVCSLIGGAASLDPGALGRLGAWALLFFLVTTLLASALGVGLALALQPGAASAAINASVGAAGSAENAPSKEVLDSFLDLARNIFPSNLVSAAFRSYSTTYEERNITGTRVKVPVGQEVEGMNILGLVVFAIVFGVALRKLGPEGELLIRFFNSFNEATMVLVSWIMWYAPVGIMFLVAGKIVEMEDVGLLFARLGKYILCCLLGHAIHGLLVLPLIYFLFTRKNPYRFLWGIVTPLATAFGTSSSSATLPLMMKCVEENNGVAKHISRFILPIGATVNMDGAALFQCVAAVFIAQLSQQSLDFVKIITILVTATASSVGAAGIPAGGVLTLAIILEAVNLPVDHISLILAVDWLVDRSCTVLNVEGDALGAGLLQNYVDRTESRSTEPELIQVKSELPLDPLPVPTEEGNPLLKHYRGPAGDATVASEKESVM

SEQ ID NO: 16548 - protein, 629 aa, Homo sapiens
MGCKVLLNIGQQMLRRKVVDCSREETRLSRCLNTFDLVALGVGSTLGAGVYVLAGAVARENAGPAIVISFLIAALASVLAGLCYGEFGARVPKTGSAYLYSYVTVGELWAFITGWNLILSYIIGTSSVARAWSATFDELIGRPIGEFSRTHMTLNAPGVLAENPDIFAVIIILILTGLLTLGVKESAMVNKIFTCINVLVLGFIMVSGFVKGSVKNWQLTEEDFGNTSGRLCLNNDTKEGKPGVGGFMPFGFSGVLSGAATCFYAFVGFDCIATTGEEVKNPQKAIPVGIVASLLICFIAYFGVSAALTLMMPYFCLDNNSPLPDAFKHVGWEGAKYAVAVGSLCALSASLLGSMFPMPRVIYAMAEDGLLFKFLANVNDRTKTPIIATLASGAVAAVMAFLFDLKDLVDLMSIGTLLAYSLVAACVLVLRYQPEQPNLVYQMASTSDELDPADQNELASTNDSQLGFLPEAEMFSLKTILSPKNMEPSKISGLIVNISTSLIAVLIITFCIVTVLGREALTKGALWAVFLLAGSALLCAVVTGVIWRQPESKTKLSFKVPFLPVLPILSIFVNVYLMMQLDQGTWVRFAVWMLIGFIIYFGYGLWHSEEASLDADQARTPDGNLDQCK

SEQ ID NO: 16549 - protein, 658 aa, Homo sapiens
MIPCRAALTFARCLIRRKIVTLDSLEDTKLCRCLSTMDLIALGVGSTLGAGVYVLAGEVAKADSGPSIVVSFLIAALASVMAGLCYAEFGARVPKTGSAYLYTYVTVGELWAFITGWNLILSYVIGTSSVARAWSGTFDELLSKQIGQFLRTYFRMNYTGLAEYPDFFAVCLILLLAGLLSFGVKESAWVNKVFTAVNILVLLFVMVAGFVKGNVANWKISEEFLKNISASAREPPSENGTSIYGAGGFMPYGFTGTLAGAATCFYAFVGFDCIATTGEEVRNPQKAIPIGIVTSLLVCFMAYFGVSAALTLMMPYYLLDEKSPLPVAFEYVGWGPAKYVVAAGSLCALSTSLLGSIFPMPRVIYAMAEDGLLFKCLAQINSKTKTPIIATLSSGAVAALMAFLFDLKALVDMMSIGTLMAYSLVAACVLILRYQPGLSYDQPKCSPEKDGLGSSPRVTSKSESQVTMLQRQGFSMRTLFCPSLLPTQQSASLVSFLVGFLAFLVLGLSVLTTYGVHAITRLEAWSLALLALFLVLFVAIVLTIWRQPQNQQKVAFMVPFLPFLPAFSILVNIYLMVQLSADTWVRFSIWMAIGFLIYFSYGIRHSLEGHLRDENNEEDAYPDNVHAAAEEKSAIQANDHHPRNLSSPFIFHEKTSEF

SEQ ID NO: 16550 - protein, 619 aa, Homo sapiens
MPWQAFRRFGQKLVRRRTLESGMAETRLARCLSTLDLVALGVGSTLGAGVYVLAGEVAKDKAGPSIVICFLVAALSSVLAGLCYAEFGARVPRSGSAYLYSYVTVGELWAFTTGWNLILSYVIGTASVARAWSSAFDNLIGNHISKTLQGSIALHVPHVLAEYPDFFALGLVLLLTGLLALGASESALVTKVFTGVNLLVLGFVMISGFVKGDVHNWKLTEEDYELAMAELNDTYSLGPLGSGGFVPFGFEGILRGAATCFYAFVGFDCIATTGEEAQNPQRSIPMGIVISLSVCFLAYFAVSSALTLMMPYYQLQPESPLPEAFLYIGWAPARYVVAVGSLCALSTSLLGSMFPMPRVIYAMAEDGLLFRVLARIHTGTRTPIIATVVSGIIAAFMAFLFKLTDLVDLMSIGTLLAYSLVSICVLILRYQPDQETKTGEEVELQEEAITTESEKLTLWGLFFPLNSIPTPLSGQIVYVCSSLLAVLLTALCLVLAQWSVPLLSGDLLWTAVVVLLLLLIIGIIVVIWRQPQSSTPLHFKVPALPLLPLMSIFVNIYLMMQMTAGTWARFGVWMLIGFAIYFGYGIQHSLEEIKSNQPSRKSRAKTVDLDPGTLYVHSV

SEQ ID NO: 16551 - protein, 635 aa, Homo sapiens
MARGLPTIASLARLCQKLNRLKPLEDSTMETSLRRCLSTLDLTLLGVGGMVGSGLYVLTGAVAKEVAGPAVLLSFGVAAVASLLAALCYAEFGARVPRTGSAYLFTYVSMGELWAFLIGWNVLLEYIIGGAAVARAWSGYLDSMFSHSIRNFTETHVGSWQVPLLGHYPDFLAAGIILLASAFVSCGARVSSWLNHTFSAISLLVILFIVILGFILAQPHNWSADEGGFAPFGFSGVMAGTASCFYAFVGFDVIAASSEEAQNPRRSVPLAIAISLAIAAGAYILVSTVLTLMVPWHSLDPDSALADAFYQRGYRWAGFIVAAGSICAMNTVLLSLLFSLPRIVYAMAADGLFFQVFAHVHPRTQVPVAGTLAFGLLTAFLALLLDLESLVQFLSLGTLLAYTFVATSIIVLRFQKSSPPSSPGPASPGPLTKQQSSFSDHLQLVGTVHASVPEPGELKPALRPYLGFLDGYSPGAVVTWALGVMLASAITIGCVLVFGNSTLHLPHWGYILLLLLTSVMFLLSLLVLGAHQQQYREDLFQIPMVPLIPALSIVLNICLMLKLSYLTWVRFSIWLLMGLAVYFGYGIRHSKENQRELPGLNSTHYVVFPRGSLEETVQAMQPPSQAPAQDPGHME

SEQ ID NO: 16552 - protein, 507 aa, Homo sapiens
MAGAGPKRRALAAPAAEEKEEAREKMLAAKSADGSAPAGEGEGVTLQRNITLLNGVAIIVGTIIGSGIFVTPTGVLKEAGSPGLALVVWAACGVFSIVGALCYAELGTTISKSGGDYAYMLEVYGSLPAFLKLWIELLIIRPSSQYIVALVFATYLLKPLFPTCPVPEEAAKLVACLCVLLLTAVNCYSVKAATRVQDAFAAAKLLALALIILLGFVQIGKGDVSNLDPNFSFEGTKLDVGNIVLALYSGLFAYGGWNYLNFVTEEMINPYRNLPLAIIISLPIVTLVYVLTNLAYFTTLSTEQMLSSEAVAVDFGNYHLGVMSWIIPVFVGLSCFGSVNGSLFTSSRLFFVGSREGHLPSILSMIHPQLLTPVPSLVFTCVMTLLYAFSKDIFSVINFFSFFNWLCVALAIIGMIWLRHRKPELERPIKVNLALPVFFILACLFLIAVSFWKTPVECGIGFTIILSGLPVYFFGVWWKNKPKWLLQGIFSTTVLCQKLMQVVPQET

SEQ ID NO: 16553 - protein, 515 aa, Homo sapiens
MEAREPGRPTPTYHLVPNTSQSQVEEDVSSPPQRSSETMQLKKEISLLNGVSLVVGNMIGSGIFVSPKGVLVHTASYGMSLIVWAIGGLFSVVGALCYAELGTTITKSGASYAYILEAFGGFIAFIRLWVSLLVVEPTGQAIIAITFANYIIQPSFPSCDPPYLACRLLAAACICLLTFVNCAYVKWGTRVQDTFTYAKVVALIAIIVMGLVKLCQGHSEHFQDAFEGSSWDMGNLSLALYSALFSYSGWDTLNFVTEEIKNPERNLPLAIGISMPIVTLIYILTNVAYYTVLNISDVLSSDAVAVTFADQTFGMFSWTIPIAVALSCFGGLNASIFASSRLFFVGSREGHLPDLLSMIHIERFTPIPALLFNCTMALIYLIVEDVFQLINYFSFSYWFFVGLSVVGQLYLRWKEPKRPRPLKLSVFFPIVFCICSVFLVIVPLFTDTINSLIGIGIALSGVPFYFMGVYLPESRRPLFIRNVLAAITRGTQQLCFCVLTELDVAEEKKDERKTD

SEQ ID NO: 16554 - protein, 511 aa, Homo sapiens
MVDSTEYEVASQPEVETSPLGDGASPGPEQVKLKKEISLLNGVCLIVGNMIGSGIFVSPKGVLIYSASFGLSLVIWAVGGLFSVFGALCYAELGTTIKKSGASYAYILEAFGGFLAFIRLWTSLLIIEPTSQAIIAITFANYMVQPLFPSCFAPYAASRLLAAACICLLTFINCAYVKWGTLVQDIFTYAKVLALIAVIVAGIVRLGQGASTHFENSFEGSSFAVGDIALALYSALFSYSGWDTLNYVTEEIKNPERNLPLSIGISMPIVTIIYILTNVAYYTVLDMRDILASDAVAVTFADQIFGIFNWIIPLSVALSCFGGLNASIVAASRLFFVGSREGHLPDAICMIHVERFTPVPSLLFNGIMALIYLCVEDIFQLINYYSFSYWFFVGLSIVGQLYLRWKEPDRPRPLKLSVFFPIVFCLCTIFLVAVPLYSDTINSLIGIAIALSGLPFYFLIIRVPEHKRPLYLRRIVGSATRYLQVLCMSVAAEMDLEDGGEMPKQRDPKSN

SEQ ID NO: 16555 - protein, 535 aa, Homo sapiens
MEEGARHRNNTEKKHPGGGESDASPEAGSGGGGVALKKEIGLVSACGIIVGNIIGSGIFVSPKGVLENAGSVGLALIVWIVTGFITVVGALCYAELGVTIPKSGGDYSYVKDIFGGLAGFLRLWIAVLVIYPTNQAVIALTFSNYVLQPLFPTCFPPESGLRLLAAICLLLLTWVNCSSVRWATRVQDIFTAGKLLALALIIIMGIVQICKGEYFWLEPKNAFENFQEPDIGLVALAFLQGSFAYGGWNFLNYVTEELVDPYKNLPRAIFISIPLVTFVYVFANVAYVTAMSPQELLASNAVAVTFGEKLLGVMAWIMPISVALSTFGGVNGSLFTSSRLFFAGAREGHLPSVLAMIHVKRCTPIPALLFTCISTLLMLVTSDMYTLINYVGFINYLFYGVTVAGQIVLRWKKPDIPRPIKINLLFPIIYLLFWAFLLVFSLWSEPVVCGIGLAIMLTGVPVYFLGVYWQHKPKCFSDFIELLTLVSQKMCVVVYPEVERGSGTEEANEDMEEQQQPMYQPTPTKDKDVAGQPQP

SEQ ID NO: 16556 - protein, 487 aa, Homo sapiens
MGDTGLRKRREDEKSIQSQEPKTTSLQKELGLISGISIIVGTIIGSGIFVSPKSVLSNTEAVGPCLIIWAACGVLATLGALCFAELGTMITKSGGEYPYLMEAYGPIPAYLFSWASLIVIKPTSFAIICLSFSEYVCAPFYVGCKPPQIVVKCLAAAAILFISTVNSLSVRLGSYVQNIFTAAKLVIVAIIIISGLVLLAQGNTKNFDNSFEGAQLSVGAISLAFYNGLWAYDGWNQLNYITEELRNPYRNLPLAIIIGIPLVTACYILMNVSYFTVMTATELLQSQAVAVTFGDRVLYPASWIVPLFVAFSTIGAANGTCFTAGRLIYVAGREGHMLKVLSYISVRRLTPAPAIIFYGIIATIYIIPGDINSLVNYFSFAAWLFYGLTILGLIVMRFTRKELERPIKVPVVIPVLMTLISVFLVLAPIISKPTWEYLYCVLFILSGLLFYFLFVHYKFGWAQKISKPITMHLQMLMEVVPPEEDPE

SEQ ID NO: 16557 - protein, 523 aa, Homo sapiens
MAGHTQQPSGRGNPRPAPSPSPVPGTVPGASERVALKKEIGLLSACTIIIGNIIGSGIFISPKGVLEHSGSVGLALFVWVLGGGVTALGSLCYAELGVAIPKSGGDYAYVTEIFGGLAGFLLLWSAVLIMYPTSLAVISMTFSNYVLQPVFPNCIPPTTASRVLSMACLMLLTWVNSSSVRWATRIQDMFTGGKLLALSLIIGVGLLQIFQGHFEELRPSNAFAFWMTPSVGHLALAFLQGSFAFSGWNFLNYVTEEMVDARKNLPRAIFISIPLVTFVYTFTNIAYFTAMSPQELLSSNAVAVTFGEKLLGYFSWVMPVSVALSTFGGINGYLFTYSRLCFSGAREGHLPSLLAMIHVRHCTPIPALLVCCGATAVIMLVGDTYTLINYVSFINYLCYGVTILGLLLLRWRRPALHRPIKVNLLIPVAYLVFWAFLLVFSFISEPMVCGVGVIIILTGVPIFFLGVFWRSKPKCVHRLTESMTHWGQELCFVVYPQDAPEEEENGPCPPSLLPATDKPSKPQ

SEQ ID NO: 16558 - protein, 501 aa, Homo sapiens
MVRKPVVSTISKGGYLQGNVNGRLPSLGNKEPPGQEKVQLKRKVTLLRGVSIIIGTIIGAGIFISPKGVLQNTGSVGMSLTIWTVCGVLSLFGALSYAELGTTIKKSGGHYTYILEVFGPLPAFVRVWVELLIIRPAATAVISLAFGRYILEPFFIQCEIPELAIKLITAVGITVVMVLNSMSVSWSARIQIFLTFCKLTAILIIIVPGVMQLIKGQTQNFKDAFSGRDSSITRLPLAFYYGMYAYAGWFYLNFVTEEVENPEKTIPLAICISMAIVTIGYVLTNVAYFTTINAEELLLSNAVAVTFSERLLGNFSLAVPIFVALSCFGSMNGGVFAVSRLFYVASREGHLPEILSMIHVRKHTPLPAVIVLHPLTMIMLFSGDLDSLLNFLSFARWLFIGLAVAGLIYLRYKCPDMHRPFKVPLFIPALFSFTCLFMVALSLYSDPFSTGIGFVITLTGVPAYYLFIIWDKKPRWFRIMSEKITRTLQIILEVVPEEDKL

SEQ ID NO: 16559 - protein, 470 aa, Homo sapiens
MDRGEKIQLKRVFGYWWGTSFLLINIIGAGIFVSPKGVLAYSCMNVGVSLCVWAGCAILAMTSTLCSAEISISFPCSGAQYYFLKRYFGSTVAFLNLWTSLFLGSGVVAGQALLLAEYSIQPFFPSCSVPKLPKKCLALAMLWIVGILTSRGVKEVTWLQIASSVLKVSILSFISLTGVVFLIRGKKENVERFQNAFDAELPDISHLIQAIFQGYFAYSGGACFTLIAGELKKPRTTIPKCIFTALPLVTVVYLLVNISYLTVLTPREILSSDAVAITWADRAFPSLAWIMPFAISTSLFSNLLISIFKSSRPIYLASQEGQLPLLFNTLNSHSSPFTAVLLLVTLGSLAIILTSLIDLINYIFFTGSLWSILLMIGILRRRYQEPNLSIPYKVFLSFPLATIVIDVGLVVIPLVKSPNVHYVYVLLLVLSGLLFYIPLIHFKIRLAWFEKMTCYLQLLFNICLPDVSEE

SEQ ID NO: 16560 - protein, 771 aa, Homo sapiens
MSGFFTSLDPRRVQWGAAWYAMHSRILRTKPVESMLEGTGTTTAHGTKLAQVLTTVDLISLGVGSCVGTGMYVVSGLVAKEMAGPGVIVSFIIAAVASILSGVCYAEFGVRVPKTTGSAYTYSYVTVGEFVAFFIGWNLILEYLIGTAAGASALSSMFDSLANHTISRWMADSVGTLNGLGKGEESYPDLLALLIAVIVTIIVALGVKNSIGFNNVLNVLNLAVWVFIMIAGLFFINGKYWAEGQFLPHGWSGVLQGAATCFYAFIGFDIIATTGEEAKNPNTSIPYAITASLVICLTAYVSVSVILTLMVPYYTIDTESPLMEMFVAHGFYAAKFVVAIGSVAGLTVSLLGSLFPMPRVIYAMAGDGLLFRFLAHVSSYTETPVVACIVSGFLAALLALLVSLRDLIEMMSIGTLLAYTLVSVCVLLLRYQPESDIDGFVKFLSEEHTKKKEGILADCEKEACSPVSEGDEFSGPATNTCGAKNLPSLGDNEMLIGKSDKSTYNVNHPNYGTVDMTTGIEADESENIYLIKLKKLIGPHYYTMRIRLGLPGKMDRPTAATGHTVTICVLLLFILMFIFCSFIIFGSDYISEQSWWAILLVVLMVLLISTLVFVILQQPENPKKLPYMAPCLPFVPAFAMLVNIYLMLKLSTITWIRFAVWCFVGLLIYFGYGIWNSTLEISAREEALHQSTYQRYDVDDPFSVEEGFSYATEGESQEDWGGPTEDKGFYYQQMSDAKANGRTSSKAKSKSKHKQNSEALIANDELDYSPE

SEQ ID NO: 16561 - protein, 630 aa, Homo sapiens; identical to SEQ ID NO: 16546

SEQ ID NO: 16562 - protein, 658 aa, Homo sapiens; identical to SEQ ID NO: 16549

SEQ ID NO: 16563 - protein, 619 aa, Homo sapiens; identical to SEQ ID NO: 16550

SEQ ID NO: 16564 - protein, 635 aa, Homo sapiens; identical to SEQ ID NO: 16551

SEQ ID NO: 16565 - protein, 1483 aa, Homo sapiens
MAPLLGRKPFPLVKPLPGEEPLFTIPHTQEAFRTREEYEARLERYSERIWTCKSTGSSQLTHKEAWEEEQEVAELLKEEFPAWYEKLVLEMVHHNTASLEKLVDTAWLEIMTKYAVGEECDFEVGKEKMLKVKIVKIHPLEKVDEEATEKKSDGACDSPSSDKENSSQIAQDHQKKETVVKEDEGRRESINDRARRSPRKLPTSLKKGERKWAPPKFLPHKYDVKLQNEDKIISNVPADSLIRTERPPNKEIVRYFIRHNALRAGTGENAPWVVEDELVKKYSLPSKFSDFLLDPYKYMTLNPSTKRKNTGSPDRKPSKKSKTDNSSLSSPLNPKLWCHVHLKKSLSGSPLKVKNSKNSKSPEEHLEEMMKMMSPNKLHTNFHIPKKGPPAKKPGKHSDKPLKAKGRSKGILNGQKSTGNSKSPKKGLKTPKTKMKQMTLLDMAKGTQKMTRAPRNSGGTPRTSSKPHKHLPPAALHLIAYYKENKDREDKRSALSCVISKTARLLSSEDRARLPEELRSLVQKRYELLEHKKRWASMSEEQRKEYLKKKREELKKKLKEKAKERREKEMLERLEKQKRYEDQELTGKNLPAFRLVDTPEGLPNTLFGDVAMVVEFLSCYSGLLLPDAQYPITAVSLMEALSADKGGFLYLNRVLVILLQTLLQDEIAEDYGELGMKLSEIPLTLHSVSELVRLCLRRSDVQEESEGSDTDDNKDSAAFEDNEVQDEFLEKLETSEFFELTSEEKLQILTALCHRILMTYSVQDHMETRQQMSAELWKERLAVLKEENDKKRAEKQKRKEMEAKNKENGKVENGLGKTDRKKEIVKFEPQVDTEAEDMISAVKSRRLLAIQAKKEREIQEREMKVKLERQAEEERIRKHKAAAEKAFQEGIAKAKLVMRRTPIGTDRNHNRYWLFSDEVPGLFIEKGWVHDSIDYRFNHHCKDHTVSGDEDYCPRSKKANLGKNASMNTQHGTATEVAVETTTPKQGQNLWFLCDSQKELDELLNCLHPQGIRESQLKERLEKRYQDIIHSIHLARKPNLGLKSCDGNQELLNFLRSDLIEVATRLQKGGLGYVEETSEFEARVISLEKLKDFGECVIALQASVIKKFLQGFMAPKQKRRKLQSEDSAKTEEVDEEKKMVEEAKVASALEKWKTAIREAQTFSRMHVLLGMLDACIKWDMSAENARCKVCRKKGEDDKLILCDECNKAFHLFCLRPALYEVPDGEWQCPACQPATARRNSRGRNYTEESASEDSEDDESDEEEEEEEEEEEEEDYEVAGLRLRPRKTIRGKHSVIPPAARSGRRPGKKPHSTRRSQPKAPPVDDAEVDELVLQTKRSSRRQSLELQKCEEILHKIVKYRFSWPFREPVTRDEAEDYYDVITHPMDFQTVQNKCSCGSYRSVQEFLTDMKQVFTNAEVYNCRGSHVLSCMVKTEQCLVALLHKHLPGHPYVRRKRKKFPDRLAEDEGDSEPEAVGQSRGRRQKK

SEQ ID NO: 16566 - protein, 530 aa, Homo sapiens
MTRDFKPGDLIFAKMKGYPHWPARVDEVPDGAVKPPTNKLPIFFFGTHETAFLGPKDIFPYSENKEKYGKPNKRKGFNEGLWEIDNNPKVKFSSQQAATKQSNASSDVEVEEKETSVSKEDTDHEEKASNEDVTKAVDITTPKAARRGRKRKAEKQVETEEAGVVTTATASVNLKVSPKRGRPAATEVKIPKPRGRPKMVKQPCPSESDIITEEDKSKKKGQEEKQPKKQPKKDEEGQKEEDKPRKEPDKKEGKKEVESKRKNLAKTGVTSTSDSEEEGDDQEGEKKRKGGRNFQTAHRRNMLKGQHEKEAADRKRKQEEQMETEQQNKDEGKKPEVKKVEKKRETSMDSRLQRIHAEIKNSLKIDNLDVNRCIEALDELASLQVTMQQAQKHTEMITTLKKIRRFKVSQVIMEKSTMLYNKFKNMFLVGEGDSVITQVLNKSLAEQRQHEEANKTKDQGKKGPNKKLEKEQTGSKTLNGGSDAQDGNQPQHNGESNEDSKDNHEASTKKKPSSEERETEISLKDSTLDN

SEQ ID NO: 16567 - protein, 228 aa, Homo sapiens
MSVSEIFVELQGFLAAEQDIREEIRKVVQSLEQTAREILTLLQGVHQGAGFQDIPKRCLKAREHFGTVKTHLTSLKTKFPAEQYYRFHEHWRFVLQRLVFLAAFVVYLETETLVTREAVTEILGIEPDREKGFHLDVEDYLSGVLILASELSRLSVNSVTAGDYSRPLHISTFINELDSGFRLLNLKNDSLRKRYDGLKYDVKKVEEVVYDLSIRGFNKETAAACVEK

SEQ ID NO: 16568 - protein, 140 aa, Homo sapiens; identical to SEQ ID NO: 14672

SEQ ID NO: 16569 - protein, 176 aa, Homo sapiens; identical to SEQ ID NO: 14673

SEQ ID NO: 16570 - protein, 164 aa, Homo sapiens; identical to SEQ ID NO: 14674

SEQ ID NO: 16571 - protein, 207 aa, Homo sapiens; identical to SEQ ID NO: 14675

SEQ ID NO: 16572 - protein, 182 aa, Homo sapiens; identical to SEQ ID NO: 14676

SEQ ID NO: 16573 - protein, 171 aa, Homo sapiens; identical to SEQ ID NO: 2330

SEQ ID NO: 16574 - protein, 552 aa, Homo sapiens
MAEKQKHDGRVKIGHYVLGDTLGVGTFGKVKIGEHQLTGHKVAVKILNRQKIRSLDVVGKIKREIQNLKLFRHPHIIKLYQVISTPTDFFMVMEYVSGGELFDYICKHGRVEEMEARRLFQQILSAVDYCHRHMVVHRDLKPENVLLDAHMNAKIADFGLSNMMSDGEFLRTSCGSPNYAAPEVISGRLYAGPEVDIWSCGVILYALLCGTLPFDDEHVPTLFKKIRGGVFYIPEYLNRSVATLLMHMLQVDPLKRATIKDIREHEWFKQDLPSYLFPEDPSYDANVIDDEAVKEVCEKFECTESEVMNSLYSGDPQDQLAVAYHLIIDNRRIMNQASEFYLASSPPSGSFMDDSAMHIPPGLKPHPERMPPLIADSPKARCPLDALNTTKPKSLAVKKAKWHLGIRSQSKPYDIMAEVYRAMKQLDFEWKVVNAYHLRVRRKNPVTGNYVKMSLQLYLVDNRSYLLDFKSIDDEVVEQRSGSSTPQRSCSAAGLHRPRSSFDSTTAESHSLSGSLTGSLTGSTLSSVSPRLGSHTMDFFEMCASLITTLAR

SEQ ID NO: 16575 - protein, 270 aa, Homo sapiens
MGNTSSERAALERHGGHKTPRRDSSGGTKDGDRPKILMDSPEDADLFHSEEIKAPEKEEFLAWQHDLEVNDKAPAQARPTVFRWTGGGKEVYLSGSFNNWSKLPLTRSHNNFVAILDLPEGEHQYKFFVDGQWTHDPSEPIVTSQLGTVNNIIQVKKTDFEVFDALMVDSQKCSDVSELSSSPPGPYHQEPYVCKPEERFRAPPILPPHLLQVILNKDTGISCDPALLPEPNHVMLNHLYALSIKDGVMVLSATHRYKKKYVTTLLYKPI

SEQ ID NO: 16576 - protein, 595 aa, Homo sapiens
MPACCSCSDVFQYETNKVTRIQSMNYGTIKWFFHVIIFSYVCFALVSDKLYQRKEPVISSVHTKVKGIAEVKEEIVENGVKKLVHSVFDTADYTFPLQGNSFFVMTNFLKTEGQEQRLCPEYPTRRTLCSSDRGCKKGWMDPQSKGIQTGRCVVYEGNQKTCEVSAWCPIEAVEEAPRPALLNSAENFTVLIKNNIDFPGHNYTTRNILPGLNITCTFHKTQNPQCPIFRLGDIFRETGDNFSDVAIQGGIMGIEIYWDCNLDRWFHHCRPKYSFRRLDDKTTNVSLYPGYNFRYAKYYKENNVEKRTLIKVFGIRFDILVFGTGGKFDIIQLVVYIGSTLSYFGLAAVFIDFLIDTYSSNCCRSHIYPWCKCCQPCVVNEYYYRKKCESIVEPKPTLKYVSFVDESHIRMVNQQLLGRSLQDVKGQEVPRPAMDFTDLSRLPLALHDTPPIPGQPEEIQLLRKEATPRSRDSPVWCQCGSCLPSQLPESHRCLEELCCRKKPGACITTSELFRKLVLSRHVLQFLLLYQEPLLALDVDSTNSRLRHCAYRCYATWRFGSQDMADFAILPSCCRWRIRKEFPKSEGQYSGFKSPY

SEQ ID NO: 16577 - protein, 1465 aa, Homo sapiens
MPEQERQITAREGASRKILSKLSLPTRAWEPAMKKSFAFDNVGYEGGLDGLGPSSQVATSTVRILGMTCQSCVKSIEDRISNLKGIISMKVSLEQGSATVKYVPSVVCLQQVCHQIGDMGFEASIAEGKAASWPSRSLPAQEAVVKLRVEGMTCQSCVSSIEGKVRKLQGVVRVKVSLSNQEAVITYQPYLIQPEDLRDHVNDMGFEAAIKSKVAPLSLGPIDIERLQSTNPKRPLSSANQNFNNSETLGHQGSHVVTLQLRIDGMHCKSCVLNIEENIGQLLGVQSIQVSLENKTAQVKYDPSCTSPVALQRAIEALPPGNFKVSLPDGAEGSGTDHRSSSSHSPGSPPRNQVQGTCSTTLIAIAGMTCASCVHSIEGMISQLEGVQQISVSLAEGTATVLYNPSVISPEELRAAIEDMGFEASVVSESCSTNPLGNHSAGNSMVQTTDGTPTSVQEVAPHTGRLPANHAPDILAKSPQSTRAVAPQKCFLQIKGMTCASCVSNIERNLQKEAGVLSVLVALMAGKAEIKYDPEVIQPLEIAQFIQDLGFEAAVMEDYAGSDGNIELTITGMTCASCVHNIESKLTRTNGITYASVALATSKALVKFDPEIIGPRDIIKIIEEIGFHASLAQRNPNAHHLDHKMEIKQWKKSFLCSLVFGIPVMALMIYMLIPSNEPHQSMVLDHNIIPGLSILNLIFFILCTFVQLLGGWYFYVQAYKSLRHRSANMDVLIVLATSIAYVYSLVILVVAVAEKAERSPVTFFDTPPMLFVFIALGRWLEHLAKSKTSEALAKLMSLQATEATVVTLGEDNLIIREEQVPMELVQRGDIVKVVPGGKFPVDGKVLEGNTMADESLITGEAMPVTKKPGSTVIAGSINAHGSVLIKATHVGNDTTLAQIVKLVEEAQMSKAPIQQLADRFSGYFVPFIIIMSTLTLVVWIVIGFIDFGVVQRYFPNPNKHISQTEVIIRFAFQTSITVLCIACPCSLGLATPTAVMVGTGVAAQNGILIKGGKPLEMAHKIKTVMFDKTGTITHGVPRVMRVLLLGDVATLPLRKVLAVVGTAEASSEHPLGVAVTKYCKEELGTETLGYCTDFQAVPGCGIGCKVSNVEGILAHSERPLSAPASHLNEAGSLPAEKDAVPQTFSVLIGNREWLRRNGLTISSDVSDAMTDHEMKGQTAILVAIDGVLCGMIAIADAVKQEAALAVHTLQSMGVDVVLITGDNRKTARAIATQVGINKVFAEVLPSHKVAKVQELQNKGKKVAMVGDGVNDSPALAQADMGVAIGTGTDVAIEAADVVLIRNDLLDVVASIHLSKRTVRRIRINLVLALIYNLVGIPIAAGVFMPIGIVLQPWMGSAAMAASSVSVVLSSLQLKCYKKPDLERYEAQAHGHMKPLTASQVSVHIGMDDRWRDSPRATPWDQVSYVSQVSLSSLTSDKPSRHSAAADDDGDKWSLLLNGRDEEQYI

SEQ ID NO: 16578 - protein, 1271 aa, Homo sapiens
MVDPVGFAEAWKAQFPDSEPPRMELRSVGDIEQELERCKASIRRLEQEVNQERFRMIYLQTLLAKEKKSYDRQRWGFRRAAQAPDGASEPRASASRPQPAPADGADPPPAEEPEARPDGEGSPGKARPGTARRPGAAASGERDDRGPPASVAALRSNFERIRKGHGQPGADAEKPFYVNVEFHHERGLVKVNDKEVSDRISSLGSQAMQMERKKSQHGAGSSVGDASRPPYRGRSSESSCGVDGDYEDAELNPRFLKDNLIDANGGSRPPWPPLEYQPYQSIYVGGMMEGEGKGPLLRSQSTSEQEKRLTWPRRSYSPRSFEDCGGGYTPDCSSNENLTSSEEDFSSGQSSRVSPSPTTYRMFRDKSRSPSQNSQQSFDSSSPPTPQCHKRHRHCPVVVSEATIVGVRKTGQIWPNDGEGAFHGDADGSFGTPPGYGCAADRAEEQRRHQDGLPYIDDSPSSSPHLSSKGRGSRDALVSGALESTKASELDLEKGLEMRKWVLSGILASEETYLSHLEALLLPMKPLKAAATTSQPVLTSQQIETIFFKVPELYEIHKEFYDGLFPRVQQWSHQQRVGDLFQKLASQLGVYRAFVDNYGVAMEMAEKCCQANAQFAEISENLRARSNKDAKDPTTKNSLETLLYKPVDRVTRSTLVLHDLLKHTPASHPDHPLLQDALRISQNFLSSINEEITPRRQSMTVKKGEHRQLLKDSFMVELVEGARKLRHVFLFTDLLLCTKLKKQSGGKTQQYDCKWYIPLTDLSFQMVDELEAVPNIPLVPDEELDALKIKISQIKNDIQREKRANKGSKATERLKKKLSEQESLLLLMSPSMAFRVHSRNGKSYTFLISSDYERAEWRENIREQQKKCFRSFSLTSVELQMLTNSCVKLQTVHSIPLTINKEDDESPGLYGFLNVIVHSATGFKQSSNLYCTLEVDSFGYFVNKAKTRVYRDTAEPNWNEEFEIELEGSQTLRILCYEKCYNKTKIPKEDGESTDRLMGKGQVQLDPQALQDRDWQRTVIAMNGIEVKLSVKFNSREFSLKRMPSRKQTGVFGVKIAVVTKRERSKVPYIVRQCVEEIERRGMEEVGIYRVSGVATDIQALKAAFDVNNKDVSVMMSEMDVNAIAGTLKLYFRELPEPLFTDEFYPNFAEGIALSDPVAKESCMLNLLLSLPEANLLTFLFLLDHLKRVAEKEAVNKMSLHNLATVFGPTLLRPSEKESKLPANPSQPITMTDSWSLEVMSQVQVLLYFLQLEAIPAPDSKRQSILFSTEV

SEQ ID NO: 16579 - protein, 1130 aa, Homo sapiens
MLEICLKLVGCKSKKGLSSSSSCYLEEALQRPVASDFEPQGLSEAARWNSKENLLAGPSENDPNLFVALYDFVASGDNTLSITKGEKLRVLGYNHNGEWCEAQTKNGQGWVPSNYITPVNSLEKHSWYHGPVSRNAAEYLLSSGINGSFLVRESESSPGQRSISLRYEGRVYHYRINTASDGKLYVSSESRFNTLAELVHHHSTVADGLITTLHYPAPKRNKPTVYGVSPNYDKWEMERTDITMKHKLGGGQYGEVYEGVWKKYSLTVAVKTLKEDTMEVEEFLKEAAVMKEIKHPNLVQLLGVCTREPPFYIITEFMTYGNLLDYLRECNRQEVNAVVLLYMATQISSAMEYLEKKNFIHRDLAARNCLVGENHLVKVADFGLSRLMTGDTYTAHAGAKFPIKWTAPESLAYNKFSIKSDVWAFGVLLWEIATYGMSPYPGIDLSQVYELLEKDYRMERPEGCPEKVYELMRACWQWNPSDRPSFAEIHQAFETMFQESSISDEVEKELGKQGVRGAVSTLLQAPELPTKTRTSRRAAEHRDTTDVPEMPHSKGQGESDPLDHEPAVSPLLPRKERGPPEGGLNEDERLLPKDKKTNLFSALIKKKKKTAPTPPKRSSSFREMDGQPERRGAGEEEGRDISNGALAFTPLDTADPAKSPKPSNGAGVPNGALRESGGSGFRSPHLWKKSSTLTSSRLATGEEEGGGSSSKRFLRSCSASCVPHGAKDTEWRSVTLPRDLQSTGRQFDSSTFGGHKSEKPALPRKRAGENRSDQVTRGTVTPPPRLVKKNEEAADEVFKDIMESSPGSSPPNLTPKPLRRQVTVAPASGLPHKEEAGKGSALGTPAAAEPVTPTSKAGSGAPGGTSKGPAEESRVRRHKHSSESPGRDKGKLSRLKPAPPPPPAASAGKAGGKPSQSPSQEAAGEAVLGAKTKATSLVDAVNSDAAKPSQPGEGLKKPVLPATPKPQSAKPSGTPISPAPVPSTLPSASSALAGDQPSSTAFIPLISTRVSLRKTRQPPERIASGAITKGVVLDSTEALCLAISRNSEQMASHSAVLEAGKNLYTFCVSYVDSIQQMRNKFAFREAINKLENNLRELQICPATAGSGPAATQDFSKLLSSVKEISDIVQR

SEQ ID NO: 16580 - protein, 655 aa, Homo sapiens
MSSSNVEVFIPVSQGNTNGFPATASNDLKAFTEGAVLSFHNICYRVKLKSGFLPCRKPVEKEILSNINGIMKPGLNAILGPTGGGKSSLLDVLAARKDPSGLSGDVLINGAPRPANFKCNSGYVVQDDVVMGTLTVRENLQFSAALRLATTMTNHEKNERINRVIQELGLDKVADSKVGTQFIRGVSGGERKRTSIGMELITDPSILFLDEPTTGLDSSTANAVLLLLKRMSKQGRTIIFSIHQPRYSIFKLFDSLTLLASGRLMFHGPAQEALGYFESAGYHCEAYNNPADFFLDIINGDSTAVALNREEDFKATEIIEPSKQDKPLIEKLAEIYVNSSFYKETKAELHQLSGGEKKKKITVFKEISYTTSFCHQLRWVSKRSFKNLLGNPQASIAQIIVTVVLGLVIGAIYFGLKNDSTGIQNRAGVLFFLTTNQCFSSVSAVELFVVEKKLFIHEYISGYYRVSSYFLGKLLSDLLPMRMLPSIIFTCIVYFMLGLKPKADAFFVMMFTLMMVAYSASSMALAIAAGQSVVSVATLLMTICFVFMMIFSGLLVNLTTIASWLSWLQYFSIPRYGFTALQHNEFLGQNFCPGLNATGNNPCNYATCTGEEYLVKQGIDLSPWGLWKNHVALACMIVIFLTIAYLKLLFLKKYS

SEQ ID NO: 16581 - protein, 1863 aa, Homo sapiens; identical to SEQ ID NO: 14811

SEQ ID NO: 16582 - protein, 3418 aa, Homo sapiens
MPIGSKERPTFFEIFKTRCNKADLGPISLNWFEELSSEAPPYNSEPAEESEHKNNNYEPNLFKTPQRKPSYNQLASTPIIFKEQGLTLPLYQSPVKELDKFKLDLGRNVPNSRHKSLRTVKTKMDQADDVSCPLLNSCLSESPVVLQCTHVTPQRDKSVVCGSLFHTPKFVKGRQTPKHISESLGAEVDPDMSWSSSLATPPTLSSTVLIVRNEEASETVFPHDTTANVKSYFSNHDESLKKNDRFIASVTDSENTNQREAASHGFGKTSGNSFKVNSCKDHIGKSMPNVLEDEVYETVVDTSEEDSFSLCFSKCRTKNLQKVRTSKTRKKIFHEANADECEKSKNQVKEKYSFVSEVEPNDTDPLDSNVANQKPFESGSDKISKEVVPSLACEWSQLTLSGLNGAQMEKIPLLHISSCDQNISEKDLLDTENKRKKDFLTSENSLPRISSLPKSEKPLNEETVVNKRDEEQHLESHTDCILAVKQAISGTSPVASSFQGIKKSIFRIRESPKETFNASFSGHMTDPNFKKETEASESGLEIHTVCSQKEDSLCPNLIDNGSWPATTTQNSVALKNAGLISTLKKKTNKFIYAIHDETSYKGKKIPKDQKSELINCSAQFEANAFEAPLTFANADSGLLHSSVKRSCSQNDSEEPTLSLTSSFGTILRKCSRNETCSNNTVISQDLDYKEAKCNKEKLQLFITPEADSLSCLQEGQCENDPKSKKVSDIKEEVLAAACHPVQHSKVEYSDTDFQSQKSLLYDHENASTLILTPTSKDVLSNLVMISRGKESYKMSDKLKGNNYESDVELTKNIPMEKNQDVCALNENYKNVELLPPEKYMRVASPSRKVQFNQNTNLRVIQKNQEETTSISKITVNPDSEELFSDNENNFVFQVANERNNLALGNTKELHETDLTCVNEPIFKNSTMVLYGDTGDKQATQVSIKKDLVYVLAEENKNSVKQHIKMTLGQDLKSDISLNIDKIPEKNNDYMNKWAGLLGPISNHSFGGSFRTASNKEIKLSEHNIKKSKMFFKDIEEQYPTSLACVEIVNTLALDNQKKLSKPQSINTVSAHLQSSVVVSDCKNSHITPQMLFSKQDFNSNHNLTPSQKAEITELSTILEESGSQFEFTQFRKPSYILQKSTFEVPENQMTILKTTSEECRDADLHVIMNAPSIGQVDSSKQFEGTVEIKRKFAGLLKNDCNKSASGYLTDENEVGFRGFYSAHGTKLNVSTEALQKAVKLFSDIENISEETSAEVHPISLSSSKCHDSVVSMFKIENHNDKTVSEKNNKCQLILQNNIEMTTGTFVEEITENYKRNTENEDNKYTAASRNSHNLEFDGSDSSKNDTVCIHKDETDLLFTDQHNICLKLSGQFMKEGNTQIKEDLSDLTFLEVAKAQEACHGNTSNKEQLTATKTEQNIKDFETSDTFFQTASGKNISVAKESFNKIVNFFDQKPEELHNFSLNSELHSDIRKNKMDILSYEETDIVKHKILKESVPVGTGNQLVTFQGQPERDEKIKEPTLLGFHTASGKKVKIAKESLDKVKNLFDEKEQGTSEITSFSHQWAKTLKYREACKDLELACETIEITAAPKCKEMQNSLNNDKNLVSIETVVPPKLLSDNLCRQTENLKTSKSIFLKVKVHENVEKETAKSPATCYTNQSPYSVIENSALAFYTSCSRKTSVSQTSLLEAKKWLREGIFDGQPERINTADYVGNYLYENNSNSTIAENDKNHLSEKQDTYLSNSSMSNSYSYHSDEVYNDSGYLSKNKLDSGIEPVLKNVEDQKNTSFSKVISNVKDANAYPQTVNEDICVEELVTSSSPCKNKNAAIKLSISNSNNFEVGPPAFRIASGKIVCVSHETIKKVKDIFTDSFSKVIKENNENKSKICQTKIMAGCYEALDDSEDILHNSLDNDECSTHSHKVFADIQSEEILQHNQNMSGLEKVSKISPCDVSLETSDICKCSIGKLHKSVSSANTCGIFSTASGKSVQVSDASLQNARQVFSEIEDSTKQVFSKVLFKSNEHSDQLTREENTAIRTPEHLISQKGFSYNVVNSSAFSGFSTASGKQVSILESSLHKVKGVLEEFDLIRTEHSLHYSPTSRQNVSKILPRVDKRNPEHCVNSEMEKTCSKEFKLSNNLNVEGGSSENNHSIKVSPYLSQFQQDKQQLVLGTKVSLVENIHVLGKEQASPKNVKMEIGKTETFSDVPVKTNIEVCSTYSKDSENYFETEAVEIAKAFMEDDELTDSKLPSHATHSLFTCPENEEMVLSNSRIGKRRGEPLILVGEPSIKRNLLNEFDRIIENQEKSLKASKSTPDGTIKDRRLFMHHVSLEPITCVPFRTTKERQEIQNPNFTAPGQEFLSKSHLYEHLTLEKSSSNLAVSGHPFYQVSATRNEKMRHLITTGRPTKVFVPPFKTKSHFHRVEQCVRNINLEENRQKQNIDGHGSDDSKNKINDNEIHQFNKNNSNQAAAVTFTKCEEEPLDLITSLQNARDIQDMRIKKKQRQRVFPQPGSLYLAKTSTLPRISLKAAVGGQVPSACSHKQLYTYGVSKHCIKINSKNAESFQFHTEDYFGKESLWTGKGIQLADGGWLIPSNDGKAGKEEFYRALCDTPGVDPKLISRIWVYNHYRWIIWKLAAMECAFPKEFANRCLSPERVLLQLKYRYDTEIDRSRRSAIKKIMERDDTAAKTLVLCVSDIISLSANISETSSNKTSSADTQKVAIIELTDGWYAVKAQLDPPLLAVLKNGRLTVGQKIILHGAELVGSPDACTPLEAPESLMLKISANSTRPARWYTKLGFFPDPRPFPLPLSSLFSDGGNVGCVDVIIQRAYPIQWMEKTSSGLYIFRNEREEEKEAAKYVEAQQKRLEALFTKIQEEFEEHEENTTKPYLPSRALTRQQVRALQDGAELYEAVKNAADPAYLEGYFSEEQLRALNNHRQMLNDKKQAQIQLEIRKAMESAEQKEQGLSRDVTTVWKLRIVSYSKKEKDSVILSIWRPSSDLYSLLTEGKRYRIYHLATSKSKSKSERANIQLAATKKTQYQQLPVSDEILFQIYQPREPLHFSKFLDPDFQPSCSEVDLIGFVVSVVKKTGLAPFVYLSDECYNLLAIKFWIDLNEDIIKPHMLIAASNLQWRPESKSGLLTLFAGDFSVFSASPKEGHFQETFNKMKNTVENIDILCNEAENKLMHILHANDPKWSTPTKDCTSGPYTAQIIPGTGNKLLMSSPNCEIYYQSPLSLCMAKRKSVSTPVSAQMTSKSCKGEKEIDDQKNCKKRRALDFLSRLPLPPPVSPICTFVSPAAQKAFQPPRSCGTKYETPIKKKELNSPQMTPFKKFNEISLLESNSIADEELALINTQALLSGSTGEKQFISVSESTRTAPTSSEDYLRLKRRCTTSLIKEQESSQASTEECEKNKQDTITTKKYI

SEQ ID NO: 16583 - protein, 61 aa, Homo sapiens
MKRFLFLLLTISLLVMVQIQTGLSGQNDTSQTSSPSASSNISGGIFLFFVANAIIHLFCFS

SEQ ID NO: 16584 - protein, 497 aa, Homo sapiens [sequence omitted]

SEQ ID NO: 16585 - protein, 260 aa, Homo sapiens [sequence omitted]

SEQ ID NO: 16586 - protein, 187 aa, Homo sapiens
MVGSLNCIVAVSQNMGIGKNGDLPWPPLRNEFRYFQRMTTTSSVEGKQNLVIMGKKTWFSIPEKNRPLKGRINLVLSRELKEPPQGAHFLSRSLDDALKLTEQPELANKVDMVWIVGGSSVYKEAMNHPGHLKLFVTRIMQDFESDTFFPEIDLEKYKLLPEYPGVLSDVQEEKGIKYKFEVYEKND

SEQ ID NO: 16587 - protein, 1025 aa, Homo sapiens
MAPVLSKDSADIESILALNPRTQTHATLCSTSAKKLDKKHWKRNPDKNCFNCEKLENNFDDIKHTTLGERGALREAMRCLKCADAPCQKSCPTNLDIKSFITSIANKNYYGAAKMIFSDNPLGLTCGMVCPTSDLCVGGCNLYATEEGPINIGGLQQFATEVFKAMSIPQIRNPSLPPPEKMSEAYSAKIALFGAGPASISCASFLARLGYSDITIFEKQEYVGGLSTSEIPQFRLPYDVVNFEIELMKDLGVKIICGKSLSVNEMTLSTLKEKGYKAAFIGIGLPEPNKDAIFQGLTQDQGFYTSKDFLPLVAKGSKAGMCACHSPLPSIRGVVIVLGAGDTAFDCATSALRCGARRVFIVFRKGFVNIRAVPEEMELAKEEKCEFLPFLSPRKVIVKGGRIVAMQFVRTEQDETGKWNEDEDQMVHLKADVVISAFGSVLSDPKVKEALSPIKFNRWGLPEVDPETMQTSEAWVFAGGDVVGLANTTVESVNDGKQASWYIHKYVQSQYGASVSAKPELPLFYTPIDLVDISVEMAGLKFINPFGLASATPATSTSMIRRAFEAGWGFALTKTFSLDKDIVTNVSPRIIRGTTSGPMYGPGQSSFLNIELISEKTAAYWCQSVTELKADFPDNIVIASIMCSYNKNDWTELAKKSEDSGADALELNLSCPHGMGERGMGLACGQDPELVRNICRWVRQAVQIPFFAKLTPNVTDIVSIARAAKEGGANGVTATNTVSGLMGLKSDGTPWPAVGIAKRTTYGGVSGTAIRPIALRAVTSIARALPGFPILATGGIDSAESGLQFLHSGASVLQVCSAIQNQDFTVIEDYCTGLKALLYLKSIEELQDWDGQSPATVSHQKGKPVPRIAELMDKKLPSFGPYLEQRKKIIAENKIRLKEQNVAFSPLKRNCFIPKRPIPTIKDVIGKALQYLGTFGELSNVEQVVAMIDEEMCINCGKCYMTCNDSGYQAIQFDPETHLPTITDTCTGCTLCLSVCPIVDCIKMVSRTTPYEPKRGVPLSVNPVC

SEQ ID NO: 16588 - protein, 1210 aa, Homo sapiens [sequence omitted]

SEQ ID NO: 16589 - protein, 297 aa, Homo sapiens
MDPGKDKEGVPQPSGPPARKKFVIPLDEDEVPPGVAKPLFRSTQSLPTVDTSAQAAPQTYAEYAISQPLEGAGATCPTGSEPLAGETPNQALKPGAKSNSIIVSPRQRGNPVLKFVRNVPWEFGDVIPDYVLGQSTCALFLSLRYHNLHPDYIHGRLQSLGKNFALRVLLVQVDVKDPQQALKELAKMCILADCTLILAWSPEEAGRYLETYKAYEQKPADLLMEKLEQDFVSRVTECLTTVKSVNKTDSQTLLTTFGSLEQLIAASREDLALCPGLGPQKARRLFDVLHEPFLKVP

SEQ ID NO: 16590 - protein, 595 aa, Homo sapiens [sequence omitted]

SEQ ID NO: 16591 - protein, 254 aa, Homo sapiens; identical to SEQ ID NO: 5200

SEQ ID NO: 16592 - protein, 1255 aa, Homo sapiens [sequence omitted]

SEQ ID NO: 16593 - protein, 1367 aa, Homo sapiens
MKSGSGGGSPTSLWGLLFLSAALSLWPTSGEICGPGIDIRNDYQQLKRLENCTVIEGYLHILLISKAEDYRSYRFPKLTVITEYLLLFRVAGLESLGDLFPNLTVIRGWKLFYNYALVIFEMTNLKDIGLYNLRNITRGAIRIEKNADLCYLSTVDWSLILDAVSNNYIVGNKPPKECGDLCPGTMEEKPMCEKTTINNEYNYRCWTTNRCQKMCPSTCGKRACTENNECCHPECLGSCSAPDNDTACVACRHYYYAGVCVPACPPNTYRFEGWRCVDRDFCANILSAESSDSEGFVIHDGECMQECPSGFIRNGSQSMYCIPCEGPCPKVCEEEKKTKTIDSVTSAQMLQGCTIFKGNLLINIRRGNNIASELENFMGLIEVVTGYVKIRHSHALVSLSFLKNLRLILGEEQLEGNYSFYVLDNQNLQQLWDWDHRNLTIKAGKMYFAFNPKLCVSEIYRMEEVTGTKGRQSKGDINTRNNGERASCESDVLHFTSTTTSKNRIIITWHRYRPPDYRDLISFTVYYKEAPFKNVTEYDGQDACGSNSWNMVDVDLPPNKDVEPGILLHGLKPWTQYAVYVKAVTLTMVENDHIRGAKSEILYIRTNASVPSIPLDVLSASNSSSQLIVKWNPPSLPNGNLSYYIVRWQRQPQDGYLYRHNYCSKDKIPIRKYADGTIDIEEVTENPKTEVCGGEKGPCCACPKTEAEKQAEKEEAEYRKVFENFLHNSIFVPRPERKRRDVMQVANTTMSSRSRNTTAADTYNITDPEELETEYPFFESRVDNKERTVISNLRPFTLYRIDIHSCNHEAEKLGCSASNFVFARTMPAEGADDIPGPVTWEPRPENSIFLKWPEPENPNGLILMYEIKYGSQVEDQRECVSRQEYRKYGGAKLNRLNPGNYTARIQATSLSGNGSWTDPVFFYVQAKTGYENFIHLIIALPVAVLLIVGGLVIMLYVFHRKRNNSRLGNGVLYASVNPEYFSAADVYVPDEWEVAREKITMSRELGQGSFGMVYEGVAKGVVKDEPETRVAIKTVNEAASMRERIEFLNEASVMKEFNCHHVVRLLGVVSQGQPTLVIMELMTRGDLKSYLRSLRPEMENNPVLAPPSLSKMIQMAGEIADGMAYLNANKFVHRDLAARNCMVAEDFTVKIGDFGMTRDIYETDYYRKGGKGLLPVRWMSPESLKDGVFTTYSDVWSFGVVLWEIATLAEQPYQGLSNEQVLRFVMEGGLLDKPDNCPDMLFELMRMCWQYNPKMRPSFLEIISSIKEEMEPGFREVSFYYSEENKLPEPEELDLEPENMESVPLDPSASSSSLPLPDRHSGHKAENGPGPGVLVLRASFDERQPYAHMNGGRKNERALPLPQSSTC

SEQ ID NO: 16594 - protein, 189 aa, Homo sapiens [sequence omitted]

SEQ ID NO: 16595 - protein, 1280 aa, Homo sapiens
MDLEGDRNGGAKKKNFFKLNNKSEKDKKEKKPTVSVFSMFRYSNWLDKLYMVVGTLAAIIHGAGLPLMMLVFGEMTDIFANAGNLEDLMSNITNRSDINDTGFFMNLEEDMTRYAYYYSGIGAGVLVAAYIQVSFWCLAAGRQIHKIRKQFFHAIMRQEIGWFDVHDVGELNTRLTDDVSKINEGIGDKIGMFFQSMATFFTGFIVGFTRGWKLTLVILAISPVLGLSAAVWAKILSSFTDKELLAYAKAGAVAEEVLAAIRTVIAFGGQKKELERYNKNLEEAKRIGIKKAITANISIGAAFLLIYASYALAFWYGTTLVLSGEYSIGQVLTVFFSVLIGAFSVGQASPSIEAFANARGAAYEIFKIIDNKPSIDSYSKSGHKPDNIKGNLEFRNVHFSYPSRKEVKILKGLNLKVQSGQTVALVGNSGCGKSTTVQLMQRLYDPTEGMVSVDGQDIRTINVRFLREIIGVVSQEPVLFATTIAENIRYGRENVTMDEIEKAVKEANAYDFIMKLPHKFDTLVGERGAQLSGGQKQRIAIARALVRNPKILLLDEATSALDTESEAVVQVALDKARKGRTTIVIAHRLSTVRNADVIAGFDDGVIVEKGNHDELMKEKGIYFKLVTMQTAGNEVELENAADESKSEIDALEMSSNDSRSSLIRKRSTRRSVRGSQAQDRKLSTKEALDESIPPVSFWRIMKLNLTEWPYFVVGVFCAIINGGLQPAFAIIFSKIIGVFTRIDDPETKRQNSNLFSLLFLALGIISFITFFLQGFTFGKAGEILTKRLRYMVFRSMLRQDVSWFDDPKNTTGALTTRLANDAAQVKGAIGSRLAVITQNIANLGTGIIISFIYGWQLTLLLLAIVPIIAIAGVVEMKMLSGQALKDKKELEGSGKIATEAIENFRTVVSLTQEQKFEHMYAQSLQVPYRNSLRKAHIFGITFSFTQAMMYFSYAGCFRFGAYLVAHKLMSFEDVLLVFSAVVFGAMAVGQVSSFAPDYAKAKISAAHIIMIIEKTPLIDSYSTEGLMPNTLEGNVTFGEVVFNYPTRPDIPVLQGLSLEVKKGQTLALVGSSGCGKSTVVQLLERFYDPLAGKVLLDGKEIKRLNVQWLRAHLGIVSQEPILFDCSIAENIAYGDNSRVVSQEEIVRAAKEANIHAFIESLPNKYSTKVGDKGTQLSGGQKQRIAIARALVRQPHILLLDEATSALDTESEKVVQEALDKAREGRTCIVIAHRLSTIQNADLIVVFQNGRVKEHGTHQQLLAQKGIYFSMVSVQAGTKRQ

SEQ ID NO: 16596 - protein, 207 aa, Homo sapiens
MDKDCEMKRTTLDSPLGKLELSGCEQGLHEIKLLGKGTSAADAVEVPAPAAVLGGPEPLMQCTAWLNAYFHQPEAIEEFPVPALHHPVFQQESFTRQVLWKLLKVVKFGEVISYQQLAALAGNPKAARAVGGAMRGNPVPILIPCHRVVCSSGAVGNYSGGLAVKEWLLAHEGHRLGKPGLGGSSGLAGAWLKGAGATSGSPPAGRN

SEQ ID NO: 16597 - protein, 1531 aa, Homo sapiens
MALRGFCSADGSDPLWDWNVTWNTSNPDFTKCFQNTVLVWVPCFYLWACFPFYFLYLSRHDRGYIQMTPLNKTKTALGFLLWIVCWADLFYSFWERSRGIFLAPVFLVSPTLLGITMLLATFLIQLERRKGVQSSGIMLTFWLVALVCALAILRSKIMTALKEDAQVDLFRDITFYVYFSLLLIQLVLSCFSDRSPLFSETIHDPNPCPESSASFLSRITFWWITGLIVRGYRQPLEGSDLWSLNKEDTSEQVVPVLVKNWKKECAKTRKQPVKVVYSSKDPAQPKESSKVDANEEVEALIVKSPQKEWNPSLFKVLYKTFGPYFLMSFFFKAIHDLMMFSGPQILKLLIKFVNDTKAPDWQGYFYTVLLFVTACLQTLVLHQYFHICFVSGMRIKTAVIGAVYRKALVITNSARKSSTVGEIVNLMSVDAQRFMDLATYINMIWSAPLQVILALYLLWLNLGPSVLAGVAVMVLMVPVNAVMAMKTKTYQVAHMKSKDNRIKLMNEILNGIKVLKLYAWELAFKDKVLAIRQEELKVLKKSAYLSAVGTFTWVCTPFLVALCTFAVYVTIDENNILDAQTAFVSLALFNILRFPLNILPMVISSIVQASVSLKRLRIFLSHEELEPDSIERRPVKDGGGTNSITVRNATFTWARSDPPTLNGITFSIPEGALVAVVGQVGCGKSSLLSALLAEMDKVEGHVAIKGSVAYVPQQAWIQNDSLRENILFGCQLEEPYYRSVIQACALLPDLEILPSGDRTEIGEKGVNLSGGQKQRVSLARAVYSNADIYLFDDPLSAVDAHVGKHIFENVIGPKGMLKNKTRILVTHSMSYLPQVDVIIVMSGGKISEMGSYQELLARDGAFAEFLRTYASTEQEQDAEENGVTGVSGPGKEAKQMENGMLVTDSAGKQLQRQLSSSSSYSGDISRHHNSTAELQKAEAKKEETWKLMEADKAQTGQVKLSVYWDYMKAIGLFISFLSIFLFMCNHVSALASNYWLSLWTDDPIVNGTQEHTKVRLSVYGALGISQGIAVFGYSMAVSIGGILASRCLHVDLLHSILRSPMSFFERTPSGNLVNRFSKELDTVDSMIPEVIKMFMGSLFNVIGACIVILLATPIAAIIIPPLGLIYFFVQRFYVASSRQLKRLESVSRSPVYSHFNETLLGVSVIRAFEEQERFIHQSDLKVDENQKAYYPSIVANRWLAVRLECVGNCIVLFAALFAVISRHSLSAGLVGLSVSYSLQVTTYLNWLVRMSSEMETNIVAVERLKEYSETEKEAPWQIQETAPPSSWPQVGRVEFRNYCLRYREDLDFVLRHINVTINGGEKVGIVGRTGAGKSSLTLGLFRINESAEGEIIIDGINIAKIGLHDLRFKITIIPQDPVLFSGSLRMNLDPFSQYSDEEVWTSLELAHLKDFVSALPDKLDHECAEGGENLSVGQRQLVCLARALLRKTKILVLDEATAAVDLETDDLIQSTIRTQFEDCTVLTIAHRLNTIMDYTRVIVLDKGEIQEYGAPSDLLQQRGLFYSMAKDAGLV

SEQ ID NO: 16598 - protein, 933 aa, Homo sapiens; identical to SEQ ID NO: 15481

SEQ ID NO: 16599 - protein, 173 aa, Homo sapiens
MQSELCFADIHDSDGSSSSSHQSLKSTAKWAASLENLLEDPEGVKRFREFLKKEFSEENVLFWLACEDFKKMQDKTQMQEKAKEIYMTFLSSKASSQVNVEGQSRLNEKILEEPHPLMFQKLQDQIFNLMKYDSYSRFLKSDLFLKHKRTEEEEEDLPDAQTAAKRASRIYNT

SEQ ID NO: 16600 - protein, 225 aa, Homo sapiens
MVTHSKFPAAGMSRPLDTSLRLKTFSSKSEYQLVVNAVRKLQESGFYWSAVTGGEANLLLSAEPAGTFLIRDSSDQRHFFTLSVKTQSGTKNLRIQCEGGSFSLQSDPRSTQPVPRFDCVLKLVHHYMPPPGAPSFPSPPTEPSSEVPEQPSAQPLPGSPPRRAYYIYSGGEKIPLVLSRPLSSNVATLQHLCRKTVNGHLDSYEKVTQLPGPIREFLDQYDAPL

SEQ ID NO: 16601 - protein, 313 aa, Homo sapiens
MPVAGSELPRRPLPPAAQERDAEPRPPHGELQYLGQIQHILRCGVRKDDRTGTGTLSVFGMQARYSLRDEFPLLTTKRVFWKGVLEELLWFIKGSTNAKELSSKGVKIWDANGSRDFLDSLGFSTREEGDLGPVYGFQWRHFGAEYRDMESDYSGQGVDQLQRVIDTIKTNPDDRRIIMCAWNPRDLPLMALPPCHALCQFYVVNSELSCQLYQRSGDMGLGVPFNIASYALLTYMIAHITGLKPGDFIHTLGDAHIYLNHIEPLKIQLQREPRPFPKLRILRKVEKIDDFKAEDFQIEGYNPHPTIKMEMAV

SEQ ID NO: 16602 - protein, 533 aa, Homo sapiens
MAVESQGGRPLVLGLLLCVLGPVVSHAGKILLIPVDGSHWLSMLGAIQQLQQRGHEIVVLAPDASLYIRDGAFYTLKTYPVPFQREDVKESFVSLGHNVFENDSFLQRVIKTYKKIKKDSAMLLSGCSHLLHNKELMASLAESSFDVMLTDPFLPCSPIVAQYLSLPTVFFLHALPCSLEFEATQCPNPFSYVPRPLSSHSDHMTFLQRVKNMLIAFSQNFLCDVVYSPYATLASEFLQREVTVQDLLSSASVWLFRSDFVKDYPRPIMPNMVFVGGINCLHQNPLSQEFEAYINASGEHGIVVFSLGSMVSEIPEKKAMAIADALGKIPQTVLWRYTGTRPSNLANNTILVKWLPQNDLLGHPMTRAFITHAGSHGVYESICNGVPMVMMPLFGDQMDNAKRMETKGAGVTLNVLEMTSEDLENALKAVINDKSYKENIMRLSSLHKDRPVEPLDLAVFWVEFVMRHKGAPHLRPAAHDLTWYQYHSLDVIGFLLAVVLTVAFITFKCCAYGYRKCLGKKGRVKKAHKSKTH

SEQ ID NO: 16603 - protein, 2002 aa, Homo sapiens; identical to SEQ ID NO: 15749

SEQ ID NO: 16604 - protein, 912 aa, Homo sapiens; identical to SEQ ID NO: 14891

SEQ ID NO: 16605 - protein, 193 aa, Homo sapiens
MAAIRKKLVIVGDGACGKTCLLIVFSKDQFPEVYVPTVFENYVADIEVDGKQVELALWDTAGQEDYDRLRPLSYPDTDVILMCFSIDSPDSLENIPEKWTPEVKHFCPNVPIILVGNKKDLRNDEHTRRELAKMKQEPVKPEEGRDMANRIGAFGYMECSAKTKDGVREVFEMATRAALQARRGKKKSGCLVL

SEQ ID NO: 16606 - protein, 845 aa, Homo sapiens
MELWRQCTHWLIQCRVLPPSHRVTWDGAQVCELAQALRDGVLLCQLLNNLLPHAINLREVNLRPQMSQFLCLKNIRTFLSTCCEKFGLKRSELFEAFDLFDVQDFGKVIYTLSALSWTPIAQNRGIMPFPTEEESVGDEDIYSGLSDQIDDTVEEDEDLYDCVENEEAEGDEIYEDLMRSEPVSMPPKMTEYDKRCCCLREIQQTEEKYTDTLGSIQQHFLKPLQRFLKPQDIEIIFINIEDLLRVHTHFLKEMKEALGTPGAANLYQVFIKYKERFLVYGRYCSQVESASKHLDRVAAAREDVQMKLEECSQRANNGRFTLRDLLMVPMQRVLKYHLLLQELVKHTQEAMEKENLRLALDAMRDLAQCVNEVKRDNETLRQITNFQLSIENLDQSLAHYGRPKIDGELKITSVERRSKMDRYAFLLDKALLICKRRGDSYDLKDFVNLHSFQVRDDSSGDRDNKKWSHMFLLIEDQGAQGYELFFKTRELKKKWMEQFEMAISNIYPENATANGHDFQMFSFEETTSCKACQMLLRGTFYQGYRCHRCRASAHKECLGRVPPCGRHGQDFPGTMKKDKLHRRAQDKKRNELGLPKMEVFQEYYGLPPPPGAIGPFLRLNPGDIVELTKAEAEQNWWEGRNTSTNEIGWFPCNRVKPYVHGPPQDLSVHLWYAGPMERAGAESILANRSDGTFLVRQRVKDAAEFAISIKYNVEVKHIKIMTAEGLYRITEKKAFRGLTELVEFYQQNSLKDCFKSLDTTLQFPFKEPEKRTISRPAVGSTKYFGTAKARYDFCARDRSELSLKEGDIIKILNKKGQQGWWRGEIYGRVGWFPANYVEEDYSEYC

SEQ ID NO: 16607 - protein, 158 aa, Homo sapiens
MSSAIERKSLDPSEEPVDEVLQIPPSLLTCGGCQQNIGDRYFLKAIDQYWHEDCLSCDLCGCRLGEVGRRLYYKLGRKLCRRDYLRLFGQDGLCASCDKRIRAYEMTMRVKDKVYHLECFKCAACQKHFCVGDRYLLINSDIVCEQDIYEWTKINGMI

SEQ ID NO: 16608 - protein, 331 aa, Homo sapiens; identical to SEQ ID NO: 15705

SEQ ID NO: 16609 - protein, 211 aa, Homo sapiens
MVAHNQVAADNAVSTAAEPRRRPEPSSSSSSSPAAPARPRPCPAVPAPAPGDTHFRTFRSHADYRRITRASALLDACGFYWGPLSVHGAHERLRAEPVGTFLVRDSRQRNCFFALSVKMASGPTSIRVHFQAGRFHLDGSRESFDCLFELLEHYVAAPRRMLGAPLRQRRVRPLQELCRQRIVATVGRENLARIPLNPVLRDYLSSFPFQI

SEQ ID NO: 16610 - protein, 283 aa, Homo sapiens; identical to SEQ ID NO: 13574

SEQ ID NO: 16611 - protein, 337 aa, Homo sapiens
MNSTCIEEQHDLDHYLFPIVYIFVIIVSIPANIGSLCVSFLQAKKESELGIYLFSLSLSDLLYALTLPLWIDYTWNKDNWTFSPALCKGSAFLMYMNFYSSTAFLTCIAVDRYLAVVYPLKFFFLRTRRFALMVSLSIWILETIFNAVMLWEDETVVEYCDAEKSNFTLCYDKYPLEKWQINLNLFRTCTGYAIPLVTILICNRKVYQAVRHNKATENKEKKRIIKLLVSITVTFVLCFTPFHVMLLIRCILEHAVNFEDHSNSGKRTYTMYRITVALTSLNCVADPILYCFVTETGRYDMWNILKFCTGRCNTSQRQRKRILSVSTKDTMELEVLE

SEQ ID NO: 16612 - protein, 1755 aa, Homo sapiens
MLSATPLYGNVHSWMNSERVRMCGASEDRKILVNDGDASKARLELREENPLNHNVVDASTAHRIDGLAALSMDRTGLIREGLRVPGNIVYSSLCGLGSEKGREAATSTLGGLGFSSERNPEMQFKPNTPETVEASAVSGKPPNGFSAIYKTPPGIQKSAVATAEALGLDRPASDKQSPLNINGASYLRLPWVNPYMEGATPAIYPFLDSPNKYSLNMYKALLPQQSYSLAQPLYSPVCTNGERFLYLPPPHYVGPHIPSSLASPMRLSTPSASPAIPPLVHCADKSLPWKMGVSPGNPVDSHAYPHIQNSKQPRVPSAKAVTSGLPGDTALLLPPSPRPSPRVHLPTQPAADTYSEFHKHYARISTSPSVALSKPYMTVSSEFPAARLSNGKYPKAPEGGEGAQPVPGHARKTAVQDRKDGSSPPLLEKQTVTKDVTDKPLDLSSKVVDVDASKADHMKKMAPTVLVHSRAGSGLVLSGSEIPKETLSPPGNGCAIYRSEIISTAPSSWVVPGPSPNEENNGKSMSLKNKALDWAIPQQRSSSCPRMGGTDAVITNVSGSVSSAGRPASASPAPNANADGTKTSRSSVETTPSVIQHVGQPPATPAKHSSSTSSKGAKASNPEPSFKANENGLPPSSIFLSPNEAFRSPPIPYPRSYLPYPAPEGIAVSPLSLHGKGPVYPHPVLLPNGSLFPGHLAPKPGLPYGLPTGRPEFVTYQDALGLGMVHPMLIPHTPIEITKEEKPERRSRSHERARYEDPTLRNRFSEILETSSTKLHPDVPTDKNLKPNPNWNQGKTVVKSDKLVYVDLLREEPDAKTDTNVSKPSFAAESVGQSAEPPKPSVEPALQQHRDFIALREELGRISDFHETYTFKQPVFTVSKDSVLAGTNKENLGLPVSTPFLEPPLGSDGPAVTFGKTQEDPKPFCVGSAPPSVDVTPTYTKDGADEAESNDGKVLKPKPSKLAKRIANSAGYVGDRFKCVTTELYADSSQLSREQRALQMEGLQEDSILCLPAAYCERAMMRFSELEMKEREGGHPATKDSEMCKFSPADWERLKGNQDKKPKSVTLEEAIAEQNESERCEYSVGNKHRDPFEAPEDKDLPVEKYFVERQPVSEPPADQVASDMPHSPTLRVDRKRKVSGDSSHTETTAEEVPEDPLLKAKRRRVSKDDWPEREMTNSSSNHLEDPHYSELTNLKVCIELTGLHPKKQRHLLHLRERWEQQVSAADGKPGRQSRKEVTQATQPEAIPQGTNITEEKPGRKRAEAKGNRSWSEESLKPSDNEQGLPVFSGSPPMKSLSSTSAGGKKQAQPSCAPASRPPAKQQKIKENQKTDVLCADEEEDCQAASLLQKYTDNSEKPSGKRLCKTKHLIPQESRRGLPLTGEYYVENADGKVTVRRFRKRPEPSSDYDLSPAKQEPKPFDRLQQLLPASQSTQLPCSSSPQETTQSRPMPPEARRLIVNKNAGETLLQRAARLGYEEVVLYCLENKICDVNHRDNAGYCALHEACARGWLNIVRHLLEYGADVNCSAQDGTRPLHDAVENDHLEIVRLLLSYGADPTLATYSGRTIMKMTHSELMEKFLTDYLNDLQGRNDDDASGTWDFYGSSVCEPDDESGYDVLANPPGPEDQDDDDDAYSDVFEFEFSETPLLPCYNIQVSVAQGPRNWLLLSDVLKKLKMSSRIFRCNFPNVEIVTIAEAEFYRQVSASLLFSCSKDLEAFNPESKELLDLVEFTNEIQTLLGSSVEWLHPSDLASDNYW

SEQ ID NO: 16613 - protein, 289 aa, Homo sapiens; identical to SEQ ID NO: 14650

SEQ ID NO: 16614 - protein, 664 aa, Homo sapiens; identical to SEQ ID NO: 12683

SEQ ID NO: 16615 - protein, 303 aa, Homo sapiens; identical to SEQ ID NO: 15310

SEQ ID NO: 16616 - protein, 254 aa, Homo sapiens; identical to SEQ ID NO: 14707

SEQ ID NO: 16617 - protein, 417 aa, Homo sapiens; identical to SEQ ID NO: 13599

SEQ ID NO: 16618 - protein, 250 aa, Homo sapiens [sequence omitted]

SEQ ID NO: 16619 - protein, 168 aa, Homo sapiens
MFQIPEFEPSEQEDSSSAERGLGPSPAGDGPSGSGKHHRQAPGLLWDASHQQEQPTSSSHHGGAGAVEIRSRHSSYPAGTEDDEGMGEEPSPFRGRSRSAPPNLWAAQRYGRELRRMSDEFVDSFKKGLPRPKSAGTATQMRQSSSWTRVFQSWWDRNLGRGSSAPSQ

SEQ ID NO: 16620 - protein, 184 aa, Homo sapiens
MLQMAGQCSQNEYFDSLLHACIPCQLRCSSNTPPLTCQRYCNASVTNSVKGTNAILWTCLGLSLIISLAVFVLMFLLRKINSEPLKDEFKNTGSGLLGMANIDLEKSRTGDEIILPRGLEYTVEECTCEDCIKSKPKVDSDHCFPLPAMEEGATILVTTKTNDYCKSLPAALSATEIEKSISAR

SEQ ID NO: 16621 - protein, 96 aa, Homo sapiens; identical to SEQ ID NO: 2120

SEQ ID NO: 16622 - protein, 97 aa, Homo sapiens; identical to SEQ ID NO: 2121

SEQ ID NO: 16623 - protein, 98 aa, Homo sapiens; identical to SEQ ID NO: 2122

SEQ ID NO: 16624 - protein, 93 aa, Homo sapiens; identical to SEQ ID NO: 2126

SEQ ID NO: 16625 - protein, 113 aa, Homo sapiens
MKVSVAALSCLMLVAVLGSQAQFINDAETELMMSKLPLENPVVLNSFHFAADCCTSYISQSIPCSLMKSYFETSSECSKPGVIFLTKKGRQVCAKPSGPGVQDCMKKLKPYSI

SEQ ID NO: 16626 - protein, 120 aa, Homo sapiens; identical to SEQ ID NO: 2130

SEQ ID NO: 16627 - protein, 94 aa, Homo sapiens; identical to SEQ ID NO: 2133

SEQ ID NO: 16628 - protein, 89 aa, Homo sapiens; identical to SEQ ID NO: 2135

SEQ ID NO: 16629 - protein, 98 aa, Homo sapiens; identical to SEQ ID NO: 2137

SEQ ID NO: 16630 - protein, 99 aa, Homo sapiens; identical to SEQ ID NO: 2138

SEQ ID NO: 16631 - protein, 96 aa, Homo sapiens; identical to SEQ ID NO: 2141

SEQ ID NO: 16632 - protein, 134 aa, Homo sapiens; identical to SEQ ID NO: 2144

SEQ ID NO: 16633 - protein, 93 aa, Homo sapiens; identical to SEQ ID NO: 2145

SEQ ID NO: 16634 - protein, 120 aa, Homo sapiens
MKVSVAALSCLMLVTALGSQARVTKDAETEFMMSKLPLENPVLLDRFHATSADCCISYTPRSIPCSLLESYFETNSECSKPGVIFLTKKGRRFCANPSDKQVQVCVRMLKLDTRIKTRKN

SEQ ID NO: 16635 - protein, 119 aa, Homo sapiens; identical to SEQ ID NO: 2149

SEQ ID NO: 16636 - protein, 150 aa, Homo sapiens; identical to SEQ ID NO: 2152

SEQ ID NO: 16637 - protein, 94 aa, Homo sapiens; identical to SEQ ID NO: 2155

SEQ ID NO: 16638 - protein, 112 aa, Homo sapiens; identical to SEQ ID NO: 2157

SEQ ID NO: 16639 - protein, 127 aa, Homo sapiens; identical to SEQ ID NO: 2159

SEQ ID NO: 16640 - protein, 92 aa, Homo sapiens; identical to SEQ ID NO: 2161

SEQ ID NO: 16641 - protein, 92 aa, Homo sapiens; identical to SEQ ID NO: 2163

SEQ ID NO: 16642 - protein, 91 aa, Homo sapiens; identical to SEQ ID NO: 2175

SEQ ID NO: 16643 - protein, 99 aa, Homo sapiens; identical to SEQ ID NO: 2180

SEQ ID NO: 16644 - protein, 99 aa, Homo sapiens; identical to SEQ ID NO: 2181

SEQ ID NO: 16645 - protein, 355 aa, Homo sapiens
METPNTTEDYDTTTEFDYGDATPCQKVNERAFGAQLLPPLYSLVFVIGLVGNILVVLVLVQYKRLKNMTSIYLLNLAISDLLFLFTLPFWIDYKLKDDWVFGDAMCKILSGFYYTGLYSEIFFIILLTIDRYLAIVHAVFALRARTVTFGVITSIIIWALAILASMPGLYFSKTQWEFTHHTCSLHFPHESLREWKLFQALKLNLFGLVLPLLVMIICYTGIIKILLRRPNEKKSKAVRLIFVIMIIFFLFWTPYNLTILISVFQDFLFTHECEQSRHLDLAVQVTEVIAYTHCCVNPVIYAFVGERFRKYLRQLFHRRVAVHLVKWLPFLSVDRLERVSSTSPSTGEHELSAGF

SEQ ID NO: 16646 - protein, 362 aa, Homo sapiens
MGTEATEQVSWGHYSGDEEDAYSAEPLPELCYKADVQAFSRAFQPSVSLTVAALGLAGNGLVLATHLAARRAARSPTSAHLLQLALADLLLALTLPFAAAGALQGWSLGSATCRTISGLYSASFHAGFLFLACISADRYVAIARALPAGPRPSTPGRAHLVSVIVWLLSLLLALPALLFSQDGQREGQRRCRLIFPEGLTQTVKGASAVAQVALGFALPLGVMVACYALLGRTLLAARGPERRRALRVVVALVAAFVVLQLPYSLALLLDTADLLAARERSCPASKRKDVALLVTSGLALARCGLNPVLYAFLGLRFRQDLRRLLRGGSCPSGPQPRRGCPRRPRLSSCSAPTETHSLSWDN

SEQ ID NO: 16647 - protein, 350 aa, Homo sapiens
MALEQNQSTDYYYEENEMNGTYDYSQYELICIKEDVREFAKVFLPVFLTIVFVIGLAGNSMVVAIYAYYKKQRTKTDVYILNLAVADLLLLFTLPFWAVNAVHGWVLGKIMCKITSALYTLNFVSGMQFLACISIDRYVAVTKVPSQSGVGKPCWIICFCVWMAAILLSIPQLVFYTVNDNARCIPIFPRYLGTSMKALIQMLEICIGFVVPFLIMGVCYFITARTLMKMPNIKISRPLKVLLTVVIVFIVTQLPYNIVKFCRAIDIIYSLITSCNMSKRMDIAIQVTESIALFHSCLNPILYVFMGASFKNYVMKVAKKYGSWRRQRQSVEEFPFDSEGPTEPTSTFSI

SEQ ID NO: 16648 - protein, 374 aa, Homo sapiens
MLSTSRSRFIRNTNESGEEVTTFFDYDYGAPCHKFDVKQIGAQLLPPLYSLVFIFGFVGNMLVVLILINCKKLKCLTDIYLLNLAISDLLFLITLPLWAHSAANEWVFGNAMCKLFTGLYHIGYFGGIFFIILLTIDRYLAIVHAVFALKARTVTFGVVTSVITWLVAVFASVPGIIFTKCQKEDSVYVCGPYFPRGWNNFHTIMRNILGLVLPLLIMVICYSGILKTLLRCRNEKKRHRAVRVIFTIMIVYFLFWTPYNIVILLNTFQEFFGLSNCESTSQLDQATQVTETLGMTHCCINPIIYAFVGEKFRSLFHIALGCRIAPLQKPVCGGPGVRPGKNVKVTTQGLLDGRGKGKSIGRAPEASLQDKEGA

SEQ ID NO: 16649 - protein, 355 aa, Homo sapiens
MTTSLDTVETFGTTSYYDDVGLLCEKADTRALMAQFVPPLYSLVFTVGLLGNVVVVMILIKYRRLRIMTNIYLLNLAISDLLFLVTLPFWIHYVRGHNWVFGHGMCKLLSGFYHTGLYSEIFFIILLTIDRYLAIVHAVFALRARTVTFGVITSIVTWGLAVLAALPEFIFYETEELFEETLCSALYPEDTVYSWRHFHTLRMTIFCLVLPLLVMAICYTGIIKTLLRCPSKKKYKAIRLIFVIMAVFFIFWTPYNVAILLSSYQSILFGNDCERSKHLDLVMLVTEVIAYSHCCMNPVIYAFVGERFRKYLRHFFHRHLLMHLGRYIPFLPSEKLERTSSVSPSTAEPELSIVF

SEQ ID NO: 16650 - protein, 360 aa, Homo sapiens
MNPTDIADTTLDESIYSNYYLYESIPKPCTKEGIKAFGELFLPPLYSLVFVFGLLGNSVVVLVLFKYKRLRSMTDVYLLNLAISDLLFVFSLPFWGYYAADQWVFGLGLCKMISWMYLVGFYSGIFFVMLMSIDRYLAIVHAVFSLRARTLTYGVITSLATWSVAVFASLPGFLFSTCYTERNHTYCKTKYSLNSTTWKVLSSLEINILGLVIPLGIMLFCYSMIIRTLQHCKNEKKNKAVKMIFAVVVLFLGFWTPYNIVLFLETLVELEVLQDCTFERYLDYAIQATETLAFVHCCLNPIIYFFLGEKFRKYILQLFKTCRGLFVLCQYCGLLQIYSADTPSSSYTQSTMDHDLHDAL

SEQ ID NO: 16651 - protein, 352 aa, Homo sapiens [sequence omitted]

SEQ ID NO: 16652 - protein, 374 aa, Homo sapiens
MSGESMNFSDVFDSSEDYFVSVNTSYYSVDSEMLLCSLQEVRQFSRLFVPIAYSLICVFGLLGNILVVITFAFYKKARSMTDVYLLNMAIADILFVLTLPFWAVSHATGAWVFSNATCKLLKGIYAINFNCGMLLLTCISMDRYIAIVQATKSFRLRSRTLPRSKIICLVVWGLSVIISSSTFVFNQKYNTQGSDVCEPKYQTVSEPIRWKLLMLGLELLFGFFIPLMFMIFCYTFIVKTLVQAQNSKRHKAIRVIIAVVLVFLACQIPHNMVLLVTAANLGKMNRSCQSEKLIGYTKTVTEVLAFLHCCLNPVLYAFIGQKFRNYFLKILKDLWCVRRKYKSSGFSCAGRYSENISRQTSETADNDNASSFTM

SEQ ID NO: 16653 - protein, 378 aa, Homo sapiens
MDLGKPMKSVLVVALLVIFQVCLCQDEVTDDYIGDNTTVDYTLFESLCSKKDVRNFKAWFLPIMYSIICFVGLLGNGLVVLTYIYFKRLKTMTDTYLLNLAVADILFLLTLPFWAYSAAKSWVFGVHFCKLIFAIYKMSFFSGMLLLLCISIDRYVAIVQAVSAHRHRARVLLISKLSCVGIWILATVLSIPELLYSDLQRSSSEQAMRCSLITEHVEAFITIQVAQMVIGFLVPLLAMSFCYLVIIRTLLQARNFERNKAIKVIIAVVVVFIVFQLPYNGVVLAQTVANFNITSSTCELSKQLNIAYDVTYSLACVRCCVNPFLYAFIGVKFRNDLFKLFKDLGCLSQEQLRQWSSCRHIRRSSMSVEAETTTTFSP

SEQ ID NO: 16654 - protein, 355 aa, Homo sapiens
MDYTLDLSVTTVTDYYYPDIFSSPCDAELIQTNGKLLLAVFYCLLFVFSLLGNSLVILVLVVCKKLRSITDVYLLNLALSDLLFVFSFPFQTYYLLDQWVFGTVMCKVVSGFYYIGFYSSMFFITLMSVDRYLAVVHAVYALKVRTIRMGTTLCLAVWLTAIMATIPLLVFYQVASEDGVLQCYSFYNQQTLKWKIFTNFKMNILGLLIPFTIFMFCYIKILHQLKRCQNHNKTKAIRLVLIVVIASLLFWVPFNVVLFLTSLHSMHILDGCSISQQLTYATHVTEIISFTHCCVNPVIYAFVGEKFKKHLSEIFQKSCSQIFNYLGRQMPRESCEKSSSCQQHSSRSSSVDYIL

SEQ ID NO: 16655 - protein, 369 aa, Homo sapiens
MTPTDFTSPIPNMADDYGSESTSSMEDYVNFNFTDFYCEKNNVRQFASHFLPPLYWLVFIVGALGNSLVILVYWYCTRVKTMTDMFLLNLAIADLLFLVTLPFWAIAAADQWKFQTFMCKVVNSMYKMNFYSCVLLIMCISVDRYIAIAQAMRAHTWREKRLLYSKMVCFTIWVLAAALCIPEILYSQIKEESGIAICTMVYPSDESTKLKSAVLTLKVILGFFLPFVVMACCYTIIIHTLIQAKKSSKHKALKVTITVLTVFVLSQFPYNCILLVQTIDAYAMFISNCAVSTNIDICFQVTQTIAFFHSCLNPVLYVFVGERFRRDLVKTLKNLGCISQAQWVSFTRREGSLKLSSMLLETTSGALSL

SEQ ID NO: 16656 - protein, 836 aa, Homo sapiens
MARLGNCSLTWAALIILLLPGSLEECGHISVSAPIVHLGDPITASCIIKQNCSHLDPEPQILWRLGAELQPGGRQQRLSDGTQESIITLPHLNHTQAFLSCCLNWGNSLQILDQVELRAGYPPAIPHNLSCLMNLTTSSLICQWEPGPETHLPTSFTLKSFKSRGNCQTQGDSILDCVPKDGQSHCCIPRKHLLLYQNMGIWVQAENALGTSMSPQLCLDPMDVVKLEPPMLRTMDPSPEAAPPQAGCLQLCWEPWQPGLHINQKCELRHKPQRGEASWALVGPLPLEALQYELCGLLPATAYTLQIRCIRWPLPGHWSDWSPSLELRTTERAPTVRLDTWWRQRQLDPRTVQLFWKPVPLEEDSGRIQGYVVSWRPSGQAGAILPLCNTTELSCTFHLPSEAQEVALVAYNSAGTSRPTPVVFSESRGPALTRLHAMARDPHSLWVGWEPPNPWPQGYVIEWGLGPPSASNSNKTWRMEQNGRATGFLLKENIRPFQLYEIIVTPLYQDTMGPSQHVYAYSQEMAPSHAPELHLKHIGKTWAQLEWVPEPPELGKSPLTHYTIFWTNAQNQSFSAILNASSRGFVLHGLEPASLYHIHLMAASQAGATNSTVLTLMTLTPEGSELHIILGLFGLLLLLTCLCGTAWLCCSPNRKNPLWPSVPDPAHSSLGSWVPTIMEEDAFQLPGLGTPPITKLTVLEEDEKKPVPWESHNSSETCGLPTLVQTYVLQGDPRAVSTQPQSQSGTSDQVLYGQLLGSPTSPGPGHYLRCDSTQPLLAGLTPSPKSYENLWFQASPLGTLVTPAPSQEDDCVFGPLLNFPLLQGIRVHGMEALGSF

SEQ ID NO: 16657 - protein, 972 aa, Homo sapiens; identical to SEQ ID NO: 3582

SEQ ID NO: 16658 - protein, 400 aa, Homo sapiens; identical to SEQ ID NO: 3591

SEQ ID NO: 16659 - protein, 976 aa, Homo sapiens [sequence omitted]

SEQ ID NO: 16660 - protein, 1097 aa, Homo sapiens; identical to SEQ ID NO: 7860

SEQ ID NO: 16661 - protein, 455 aa, Homo sapiens; identical to SEQ ID NO: 13589

SEQ ID NO: 16662 - protein, 461 aa, Homo sapiens; identical to SEQ ID NO: 13591

SEQ ID NO: 16663 - protein, 569 aa, Homo sapiens; identical to SEQ ID NO: 6962

SEQ ID NO: 16664 - protein, 551 aa, Homo sapiens; identical to SEQ ID NO: 7030

SEQ ID NO: 16665 - protein, 378 aa, Homo sapiens; identical to SEQ ID NO: 7076

SEQ ID NO: 16666 - protein, 825 aa, Homo sapiens; identical to SEQ ID NO: 7097

SEQ ID NO: 16667 - protein, 468 aa, Homo sapiens; identical to SEQ ID NO: 7125

SEQ ID NO: 16668 - protein, 459 aa, Homo sapiens [sequence omitted]

SEQ ID NO: 16669 - protein, 918 aa, Homo sapiens; identical to SEQ ID NO: 7130

SEQ ID NO: 16670 - protein, 369 aa, Homo sapiens
MLKPSLPFTSLLFLQLPLLGVGLNTTILTPNGNEDTTADFFLTTMPTDSLSVSTLPLPEVQCFVFNVEYMNCTWNSSSEPQPTNLTLHYWYKNSDNDKVQKCSHYLFSEEITSGCQLQKKEIHLYQTFVVQLQDPREPRRQATQMLKLQNLVIPWAPENLTLHKLSESQLELNWNNRFLNHCLEHLVQYRTDWDHSWTEQSVDYRHKFSLPSVDGQKRYTFRVRSRFNPLCGSAQHWSEWSHPIHWGSNTSKENPFLFALEAVVISVGSMGLIISLLCVYFWLERTMPRIPTLKNLEDLVTEYHGNFSAWSGVSKGLAESLQPDYSERLCLVSEIPPKGGALGEGPGASPCNQHSPYWAPPCYTLKPET

SEQ ID NO: 16671 - protein, 234 aa, Homo sapiens
MDPGLQQALNGMAPPGDTAMHVPAGSVASHLGTTSRSYFYLTTATLALCLVFTVATIMVLVVQRTDSIPNSPDNVPLKGGNCSEDLLCILKRAPFKKSWAYLQVAKHLNKTKLSWNKDGILHGVRYQDGNLVIQFPGLYFIICQLQFLVQCPNNSVDLKLELLINKHIKKQALVTVCESGMQTKHVYQNLSQFLLDYLQVNTTISVNVDTFQYIDTSTFPLENVLSIFLYSNSD

SEQ ID NO: 16672 - protein, 261 aa, Homo sapiens
MIETYNQTSPRSAATGLPISMKIFMYLLTVFLITQMIGSALFAVYLHRRLDKIEDERNLHEDFVFMKTIQRCNTGERSLSLLNCEEIKSQFEGFVKDIMLNKEETKKENSFEMQKGDQNPQIAAHVISEASSKTTSVLQWAEKGYYTMSNNLVTLENGKQLTVKRQGLYYIYAQVTFCSNREASSQAPFIASLCLKSPGRFERILLRAANTHSSAKPCGQQSIHLGGVFELQPGASVFVNVTDPSQVSHGTGFTSFGLLKL

SEQ ID NO: 16673 - protein, 281 aa, Homo sapiens; identical to SEQ ID NO: 16510

SEQ ID NO: 16674 - protein, 662 aa, Homo sapiens; identical to SEQ ID NO: 6869

SEQ ID NO: 16675 - protein, 427 aa, Homo sapiens; identical to SEQ ID NO: 6880

SEQ ID NO: 16676 - protein, 380 aa, Homo sapiens
MAFVCLAIGCLYTFLISTTFGCTSSSDTEIKVNPPQDFEIVDPGYLGYLYLQWQPPLSLDHFKECTVEYELKYRNIGSETWKTIITKNLHYKDGFDLNKGIEAKIHTLLPWQCTNGSEVQSSWAETTYWISPQGIPETKVQDMDCVYYNWQYLLCSWKPGIGVLLDTNYNLFYWYEGLDHALQCVDYIKADGQNIGCRFPYLEASDYKDFYICVNGSSENKPIRSSYFTFQLQNIVKPLPPVYLTFTRESSCEIKLKWSIPLGPIPARCFDYEIEIREDDTTLVTATVENETYTLKTTNETRQLCFVVRSKVNIYCSDDGIWSEWSDKQCWEGEDLSKKTLLRFWLPFGFILILVIFVTGLLLRKPNTYPKMIPEFFCDT

SEQ ID NO: 16677 - protein, 272 aa, Homo sapiens
MDSYLLMWGLLTFIMVPGCQAELCDDDPPEIPHATFKAMAYKEGTMLNCECKRGFRRIKSGSLYMLCTGNSSHSSWDNQCQCTSSATRNTTKQVTPQPEEQKERKTTEMQSPMQPVDQASLPGHCREPPPWENEATERIYHFVVGQMVYYQCVQGYRALHRGPAESVCKMTHGKTRWTQPQLICTGEMETSQFPGEEKPQASPEGRPESETSCLVTTTDFQIQTEMAATMETSIFTTEYQVAVAGCVFLLISVLLLSGLTWQRRQRKSRRTI

SEQ ID NO: 16678 - protein, 260 aa, Homo sapiens
MARPHPWWLCVLGTLVGLSATPAPKSCPERHYWAQGKLCCQMCEPGTFLVKDCDQHRKAAQCDPCIPGVSFSPDHHTRPHCESCRHCNSGLLVRNCTITANAECACRNGWQCRDKECTECDPLPNPSLTARSSQALSPHPQPTHLPYVSEMLEARTAGHMQTLADFRQLPARTLSTHWPPQRSLCSSDFIRILVIFSGMFLVFTLAGALFLHQRRKYRSNKGESPVEPAEPCHYSCPREEEGSTIPIQEDYRKPEPACSP

SEQ ID NO: 16679 - protein, 595 aa, Homo sapiens
MRVLLAALGLLFLGALRAFPQDRPFEDTCHGNPSHYYDKAVRRCCYRCPMGLFPTQQCPQRPTDCRKQCEPDYYLDEADRCTACVTCSRDDLVEKTPCAWNSSRVCECRPGMFCSTSAVNSCARCFFHSVCPAGMIVKFPGTAQKNTVCEPASPGVSPACASPENCKEPSSGTIPQAKPTPVSPATSSASTMPVRGGTRLAQEAASKLTRAPDSPSSVGRPSSDPGLSPTQPCPEGSGDCRKQCEPDYYLDEAGRCTACVSCSRDDLVEKTPCAWNSSRTCECRPGMICATSATNSCARCVPYPICAAETVTKPQDMAEKDTTFEAPPLGTQPDCNPTPENGEAPASTSPTQSLLVDSQASKTLPIPTSAPVALSSTGKPVLDAGPVLFWVILVLVVVVGSSAFLLCHRRACRKRIRQKLHLCYPVQTSQPKLELVDSRPRRSSTQLRSGASVTEPVAEERGLMSQPLMETCHSVGAAYLESLPLQDASPAGGPSSPRDLPEPRVSTEHTNNKIEKIYIMKADTVIVGTVKAELPEGRGLAGPAEPELEEELEADHTPHYPEQETEPPLGSCSDVMLSVEEEGKEDPLPTAASGK

SEQ ID NO: 16680 - protein, 458 aa, Homo sapiens; identical to SEQ ID NO: 2334

SEQ ID NO: 16681 - protein, 277 aa, Homo sapiens; identical to SEQ ID NO: 2337

SEQ ID NO: 16682 - protein, 193 aa, Homo sapiens
MPEEGSGCSVRRRPYGCVLRAALVPLVAGLVICLVVCIQRFAQAQQQLPLESLGWDVAELQLNHTGPQQDPRLYWQGGPALGRSFLHGPELDKGQLRIHRDGIYMVHIQVTLAICSSTTASRHHPTTLAVGICSPASRSISLLRLSFHQGCTIASQRLTPLARGDTLCTNLTGTLLPSRNTDETFFGVQWVRP

SEQ ID NO: 16683 - protein, 335 aa, Homo sapiens; identical to SEQ ID NO: 5109

SEQ ID NO: 16684 - protein, 400 aa, Homo sapiens; identical to SEQ ID NO: 3591

SEQ ID NO: 16685 - protein, 489 aa, Homo sapiens; identical to SEQ ID NO: 6747

SEQ ID NO: 16686 - protein, 398 aa, Homo sapiens; identical to SEQ ID NO: 6966

SEQ ID NO: 16687 - protein, 897 aa, Homo sapiens
MVLAQGLLSMALLALCWERSLAGAEETIPLQTLRCYNDYTSHITCRWADTQDAQRLVNVTLIRRVNEDLLEPVSCDLSDDMPWSACPHPRCVPRRCVIPCQSFVVTDVDYFSFQPDRPLGTRLTVTLTQHVQPPEPRDLQISTDQDHFLLTWSVALGSPQSHWLSPGDLEFEVVYKRLQDSWEDAAILLSNTSQATLGPEHLMPSSTYVARVRTRLAPGSRLSGRPSKWSPEVCWDSQPGDEAQPQNLECFFDGAAVLSCSWEVRKEVASSVSFGLFYKPSPDAGEEECSPVLREGLGSLHTRHHCQIPVPDPATHGQYIVSVQPRRAEKHIKSSVNIQMAPPSLNVTKDGDSYSLRWETMKMRYEHIDHTFEIQYRKDTATWKDSKTETLQNAHSMALPALEPSTRYWARVRVRTSRTGYNGIWSEWSEARSWDTESVLPMWVLALIVIFLTIAVLLALRFCGIYGYRLRRKWEEKIPNPSKSHLFQNGSAELWPPGSMSAFTSGSPPHQGPWGSRFPELEGVFPVGFGDSEVSPLTIEDPKHVCDPPSGPDTTPAASDLPTEQPPSPQPGPPAASHTPEKQASSFDFNGPYLGPPHSRSLPDILGQPEPPQEGGSQKSPPPGSLEYLCLPAGGQVQLVPLAQAMGPGQAVEVERRPSQGAAGSPSLESGGGPAPPALGPRVGGQDQKDSPVAIPMSSGDTEDPGVASGYVSSADLVFTPNSGASSVSLVPSLGLPSDQTPSLCPGLASGPPGAPGPVKSGFEGYVELPPIEGRSPRSPRNNPVPPEAKSPVLNPGERPADVSPTSPQPEGLLVLQQVGDYCFLPGLGPGPLSLRSKPSSPGPGPEIKNLDQAFQVKKPPGQAVPQVPVIQLFKALKQQDYLSLPPWEVNKPGEVC

SEQ ID NO: 16688 - protein, 897 aa, Homo sapiens; identical to SEQ ID NO: 16687

SEQ ID NO: 16689 - protein, 255 aa, Homo sapiens; identical to SEQ ID NO: 14706

SEQ ID NO: 16690 - protein, 578 aa, Homo sapiens
MLPCLVVLLAALLSLRLGSDAHGTELPSPPSVWFEAEFFHHILHWTPIPNQSESTCYEVALLRYGIESWNSISNCSQTLSYDLTAVTLDLYHSNGYRARVRAVDGSRHSNWTVTNTRFSVDEVTLTVGSVNLEIHNGFILGKIQLPRPKMAPANDTYESIFSHFREYEIAIRKVPGNFTFTHKKVKHENFSLLTSGEVGEFCVQVKPSVASRSNKGMWSKEECISLTRQYFTVTNVIIFFAFVLLLSGALAYCLALQLYVRRRKKLPSVLLFKKPSPFIFISQRPSPETQDTIHPLDEEAFLKVSPELKNLDLHGSTDSGFGSTKPSLQTEEPQFLLPDPHPQADRTLGNREPPVLGDSCSSGSSNSTDSGICLQEPSLSPSTGPTWEQQVGSNSRGQDDSGIDLVQNSEGRAGDTQGGSALGHHSPPEPEVPGEEDPAAVAFQGYLRQTRCAEEKATKTGCLEEESPLTDGLGPKFGRCLVDEAGLHPPALAKGYLKQDPLEMTLASSGAPTGQWNQPTEEWSLLALSSCSDLGISDWSFAHDLAPLGCVAAPGGLLGSFNSDLVTLPLISSLQSSE

SEQ ID NO: 16691 - protein, 866 aa, Homo sapiens; identical to SEQ ID NO: 6906

SEQ ID NO: 16692 - protein, 397 aa, Homo sapiens; identical to SEQ ID NO: 3787

SEQ ID NO: 16693 - protein, 355 aa, Homo sapiens
MDQFPESVTENFEYDDLAEACYIGDIVVFGTVFLSIFYSVIFAIGLVGNLLVVFALTNSKKPKSVTDIYLLNLALSDLLFVATLPFWTHYLINEKGLHNAMCKFTTAFFFIGFFGSIFFITVISIDRYLAIVLAANSMNNRTVQHGVTISLGVWAAAILVAAPQFMFTKQKENECLGDYPEVLQEIWPVLRNVETNFLGFLLPLLIMSYCYFRIIQTLFSCKNHKKAKAIKLILLVVIVFFLFWTPYNVMIFLETLKLYDFFPSCDMRKDLRLALSVTETVAFSHCCLNPLIYAFAGEKFRRYLYHLYGKCLAVLCGRSVHVDFSSSESQRSRHGSVLSSNFTYHTSDGDALLLL

SEQ ID NO: 16694 - protein, 107 aa, Homo sapiens; identical to SEQ ID NO: 3795

SEQ ID NO: 16695 - protein, 98 aa, Homo sapiens; identical to SEQ ID NO: 3796

SEQ ID NO: 16696 - protein, 94 aa, Homo sapiens; identical to SEQ ID NO: 3797

SEQ ID NO: 16697 - protein, 93 aa, Homo sapiens; identical to SEQ ID NO: 3801

SEQ ID NO: 16698 - protein, 109 aa, Homo sapiens; identical to SEQ ID NO: 3805

SEQ ID NO: 16699 - protein, 111 aa, Homo sapiens; identical to SEQ ID NO: 3807

SEQ ID NO: 16700 - protein, 254 aa, Homo sapiens
MGRDLRPGSRVLLLLLLLLLVYLTQPGNGNEGSVTGSCYCGKRISSDSPPSVQFMNRLRKHLRAYHRCLYYTRFQLLSWSVCGGNKDPWVQELMSCLDLKECGHAYSGIVAHQKHLLPTSPPISQASEGASSDIHTPAQMLLSTLQSTQRPTLPVGSLSSDKELTRPNETTIHTAGHSLAAGPEAGENQKQPEKNAGPTARTSATVPVLCLLAIIFILTAALSYVLCKRRRGQSPQSSPDLPVHYIPVAPDSNT

SEQ ID NO: 16701 - protein, 107 aa, Homo sapiens; identical to SEQ ID NO: 3810

SEQ ID NO: 16702 - protein, 107 aa, Homo sapiens; identical to SEQ ID NO: 3811

SEQ ID NO: 16703 - protein, 101 aa, Homo sapiens; identical to SEQ ID NO: 10258

SEQ ID NO: 16704 - protein, 114 aa, Homo sapiens; identical to SEQ ID NO: 3812

SEQ ID NO: 16705 - protein, 114 aa, Homo sapiens; identical to SEQ ID NO: 3814

SEQ ID NO: 16706 - protein, 128 aa, Homo sapiens; identical to SEQ ID NO: 10670

SEQ ID NO: 16707 - protein, 99 aa, Homo sapiens; identical to SEQ ID NO: 3816

SEQ ID NO: 16708 - protein, 125 aa, Homo sapiens; identical to SEQ ID NO: 3817

SEQ ID NO: 16709 - protein, 350 aa, Homo sapiens
MSNITDPQMWDFDDLNFTGMPPADEDYSPCMLETETLNKYVVIIAYALVFLLSLLGNSLVMLVILYSRVGRSVTDVYLLNLALADLLFALTLPIWAASKVNGWIFGTFLCKVVSLLKEVNFYSGILLLACISVDRYLAIVHATRTLTQKRHLVKFVCLGCWGLSMNLSLPFFLFRQAYHPNNSSPVCYEVLGNDTAKWRMVLRILPHTFGFIVPLFVMLFCYGFTLRTLFKAHMGQKHRAMRVIFAVVLIFLLCWLPYNLVLLADTLMRTQVIQESCERRNNIGRALDATEILGFLHSCLNPIIYAFIGQNFRHGFLKILAMHGLVSKEFLARHRVTSYTSSSVNVSSNL

SEQ ID NO: 16710 - protein, 360 aa, Homo sapiens
MEDFNMESDSFEDFWKGEDLSNYSYSSTLPPFLLDAAPCEPESLEINKYFVVIIYALVFLLSLLGNSLVMLVILYSRVGRSVTDVYLLNLALADLLFALTLPIWAASKVNGWIFGTFLCKVVSLLKEVNFYSGILLLACISVDRYLAIVHATRTLTQKRYLVKFICLSIWGLSLLLALPVLLFRRTVYSSNVSPACYEDMGNNTANWRMLLRILPQSFGFIVPLLIMLFCYGFTLRTLFKAHMGQKHRAMRVIFAVVLIFLLCWLPYNLVLLADTLMRTQVIQETCERRNHIDRALDATEILGILHSCLNPLIYAFIGQKFRHGLLKILAIHGLISKDSLPKDSRPSFVGSSSGHTSTTL

SEQ ID NO: 16711 - protein, 368 aa, Homo sapiens
MVLEVSDHQVLNDAEVAALLENFSSSYDYGENESDSCCTSPPCPQDFSLNFDRAFLPALYSLLFLLGLLGNGAVAAVLLSRRTALSSTDTFLLHLAVADTLLVLTLPLWAVDAAVQWVFGSGLCKVAGALFNINFYAGALLLACISFDRYLNIVHATQLYRRGPPARVTLTCLAVWGLCLLFALPDFIFLSAHHDERLNATHCQYNFPQVGRTALRVLQLVAGFLLPLLVMAYCYAHILAVLLVSRGQRRLRAMRLVVVVVVAFALCWTPYHLVVLVDILMDLGALARNCGRESRVDVAKSVTSGLGYMHCCLNPLLYAFVGVKFRERMWMLLLRLGCPNQRGLQRQPSSSRRDSSWSETSEASYSGL

SEQ ID NO: 16712 - protein, 352 aa, Homo sapiens
MEGISIYTSDNYTEEMGSGDYDSMKEPCFREENANFNKIFLPTIYSIIFLTGIVGNGLVILVMGYQKKLRSMTDKYRLHLSVADLLFVITLPFWAVDAVANWYFGNFLCKAVHVIYTVNLYSSVLILAFISLDRYLAIVHATNSQRPRKLLAEKVVYVGVWIPALLLTIPDFIFANVSEADDRYICDRFYPNDLWVVVFQFQHIMVGLILPGIVILSCYCIIISKLSHSKGHQKRKALKTTVILILAFFACWLPYYIGISIDSFILLEIIKQGCEFENTVHKWISITEALAFFHCCLNPILYAFLGAKFKTSAQHALTSVSRGSSLKILSKGKRGGHSSVSTESESSSFHSS

SEQ ID NO: 16713 - protein, 372 aa, Homo sapiens
MNYPLTLEMDLENLEDLFWELDRLDNYNDTSLVENHLCPATEGPLMASFKAVFVPVAYSLIFLLGVIGNVLVLVILERHRQTRSSTETFLFHLAVADLLLVFILPFAVAEGSVGWVLGTFLCKTVIALHKVNFYCSSLLLACIAVDRYLAIVHAVHAYRHRRLLSIHITCGTIWLVGFLLALPEILFAKVSQGHHNNSLPRCTFSQENQAETHAWFTSRFLYHVAGFLLPMLVMGWCYVGVVHRLRQAQRRPQRQKAVRVAILVTSIFFLCWSPYHIVIFLDTLARLKAVDNTCKLNGSLPVAITMCEFLGLAHCCLNPMLYTFAGVKFRSDLSRLLTKLGCTGPASLCQLFPSWRRSSLSESENATSLTTF

SEQ ID NO: 16714 - protein, 342 aa, Homo sapiens
MAEHDYHEDYGFSSFNDSSQEEHQDFLQFSKVFLPCMYLVVFVCGLVGNSLVLVISIFYHKLQSLTDVFLVNLPLADLVFVCTLPFWAYAGIHEWVFGQVMCKSLLGIYTINFYTSMLILTCITVDRFIVVVKATKAYNQQAKRMTWGKVTSLLIWVISLLVSLPQIIYGNVFNLDKLICGYHDEAISTVVLATQMTLGFFLPLLTMIVCYSVIIKTLLHAGGFQKHRSLKIIFLVMAVFLLTQMPFNLMKFIRSTHWEYYAMTSFHYTIMVTEAIAYLRACLNPVLYAFVSLKFRKNFWKLVKDIGCLPYLGVSHQWKSSEDNSKTFSASHNVEATSMFQL

SEQ ID NO: 16715 - protein, 362 aa, Homo sapiens
MDLHLFDYSEPGNFSDISWPCNSSDCIVVDTVMCPNMPNKSVLLYTLSFIYIFIFVIGMIANSVVVWVNIQAKTTGYDTHCYILNLAIADLWVVLTIPVWVVSLVQHNQWPMGELTCKVTHLIFSINLFGSIFFLTCMSVDRYLSITYFTNTPSSRKKMVRRVVCILVWLLAFCVSLPDTYYLKTVTSASNNETYCRSFYPEHSIKEWLIGMELVSVVLGFAVPFSIIAVFYFLLARAISASSDQEKHSSRKIIFSYVVVFLVCWLPYHVAVLLDIFSILHYIPFTCRLEHALFTALHVTQCLSLVHCCVNPVLYSFINRNYRYELMKAFIFKYSAKTGLTKLIDASRVSETEYSALEQSTK

SEQ ID NO: 16716 - protein, 336 aa, Homo sapiens
MGNCLHRAELSPSTENSSQLDFEDVWNSSYGVNDSFPDGDYGANLEAAAPCHSCNLLDDSALPFFILTSVLGILASSTVLFMLFRPLFRWQLCPGWPVLAQLAVGSALFSIVVPVLAPGLGSTRSSALCSLGYCVWYGSAFAQALLLGCHASLGHRLGAGQVPGLTLGLTVGIWGVAALLTLPVTLASGASGGLCTLIYSTELKALQATHTVACLAIFVLLPLGLFGAKGLKKALGMGPGPWMNILWAWFIFWWPHGVVLGLDFLVRSKLLLLSTCLAQQALDLLLNLAEALAILHCVATPLLLALFCHQATRTLLPSLPLPEGWSSHLDTLGSKS

SEQ ID NO: 16717 - protein, 193 aa, Homo sapiens; identical to SEQ ID NO: 4835

SEQ ID NO: 16718 - protein, 508 aa, Homo sapiens
MDHLGASLWPQVGSLCLLLAGAAWAPPPNLPDPKFESKAALLAARGPEELLCFTERLEDLVCFWEEAASAGVGPGNYSFSYQLEDEPWKLCRLHQAPTARGAVRFWCSLPTADTSSFVPLELRVTAASGAPRYHRVIHINEVVLLDAPVGLVARLADESGHVVLRWLPPPETPMTSHIRYEVDVSAGNGAGSVQRVEILEGRTECVLSNLRGRTRYTFAVRARMAEPSFGGFWSAWSEPVSLLTPSDLDPLILTLSLILVVILVLLTVLALLSHRRALKQKIWPGIPSPESEFEGLFTTHKGNFQLWLYQNDGCLWWSPCTPFTEDPPASLEVLSERCWGTMQAVEPGTDDEGPLLEPVGSEHAQDTYLVLDKWLLPRNPPSEDLPGPGGSVDIVAMDEGSEASSCSSALASKPSPEGASAASFEYTILDPSSQLLRPWTLCPELPPTPPHLKYLYLVVSDSGISTDYSSGDSQGAQGGLSDGPYSNPYENSLIPAAEPLPPSYVACS

SEQ ID NO: 16719 - protein, 993 aa, Homo sapiens
MPALARDGGQLPLLVVFSAMIFGTITNQDLPVIKCVLINHKNNDSSVGKSSSYPMVSESPEDLGCALRPQSSGTVYEAAAVEVDVSASITLQVLVDAPGNISCLWVFKHSSLNCQPHFDLQNRGVVSMVILKMTETQAGEYLLFIQSEATNYTILFTVSIRNTLLYTLRRPYFRKMENQDALVCISESVPEPIVEWVLCDSQGESCKEESPAVVKKEEKVLHELFGTDIRCCARNELGRECTRLFTIDLNQTPQTTLPQLFLKVGEPLWIRCKAVHVNHGFGLTWELENKALEEGNYFEMSTYSTNRTMIRILFAFVSSVARNDTGYYTCSSSKHPSQSALVTIVEKGFINATNSSEDYEIDQYEEFCFSVRFKAYPQIRCTWTFSRKSFPCEQKGLDNGYSISKFCNHKHQPGEYIFHAENDDAQFTKMFTLNIRRKPQVLAEASASQASCFSDGYPLPSWTWKKCSDKSPNCTEEITEGVWNRKANRKVFGQWVSSSTLNMSEAIKGFLVKCCAYNSLGTSCETILLNSPGPFPFIQDNISFYATIGVCLLFIVVLTLLICHKYKKQFRYESQLQMVQVTGSSDNEYFYVDFREYEYDLKWEFPRENLEFGKVLGSGAFGKVMNATAYGISKTGVSIQVAVKMLKEKADSSEREALMSELKMMTQLGSHENIVNLLGACTLSGPIYLIFEYCCYGDLLNYLRSKREKFHRTWTEIFKEHNFSFYPTFQSHPNSSMPGSREVQIHPDSDQISGLHGNSFHSEDEIEYENQKRLEEEEDLNVLTFEDLLCFAYQVAKGMEFLEFKSCVHRDLAARNVLVTHGKVVKICDFGLARDIMSDSNYVVRGNARLPVKWMAPESLFEGIYTIKSDVWSYGILLWEIFSLGVNPYPGIPVDANFYKLIQNGFKMDQPFYATEEIYIIMQSCWAFDSRKRPSFPNLTSFLGCQLADAEEAMYQNVDGRVSECPHTYQNRRPFSREMDLGLLSPQAQVEDS

SEQ ID NO: 16720 - protein, 235 aa, Homo sapiens
MTVLAPAWSPTTYLLLLLLLSSGLSGTQDCSFQHSPISSDFAVKIRELSDYLLQDYPVTVASNLQDEELCGGLWRLVLAQRWMERLKTVAGSKMQGLLERVNTEIHFVTKCAFQPPPSCLRFVQTNISRLLQETSEQLVALKPWITRQNFSRCLELQCQPDSSTLPPPWSPRPLEATAPTAPQPPLLLLLLLPVGLLLLAAAWCLHWQRTRRRTPRPGEQVPPVPSPQDLLLVEH

SEQ ID NO: 16721 - protein, 836 aa, Homo sapiens; identical to SEQ ID NO: 16656

SEQ ID NO: 16722 - protein, 241 aa, Homo sapiens; identical to SEQ ID NO: 13579

SEQ ID NO: 16723 - protein, 199 aa, Homo sapiens; identical to SEQ ID NO: 14709

SEQ ID NO: 16724 - protein, 897 aa, Homo sapiens; identical to SEQ ID NO: 16687

SEQ ID NO: 16725 - protein, 918 aa, Homo sapiens; identical to SEQ ID NO: 7130

SEQ ID NO: 16726 - protein, 283 aa, Homo sapiens; identical to SEQ ID NO: 13574

SEQ ID NO: 16727 - protein, 166 aa, Homo sapiens; identical to SEQ ID NO: 6744

SEQ ID NO: 16728 - protein, 337 aa, Homo sapiens
MRPTLLWSLLLLLGVFAAAAAAPPDPLSQLPAPQHPKIRLYNAEQVLSWEPVALSNSTRPVVYQVQFKYTDSKWFTADIMSIGVNCTQITATECDFTAASPSAGFPMDFNVTLRLRAELGALHSAWVTMPWFQHYRNVTVGPPENIEVTPGEGSLIIRFSSPFDIADTSTAFFCYYVHYWEKGGIQQVKGPFRSNSISLDNLKPSRVYCLQVQAQLLWNKSNIFRVGHLSNISCYETMADASTELQQVILISVGTFSLLSVLAGACFFLVLKYRGLIKYWFHTPPSIPLQIEEYLKDPTQPILEALDKDSSPKDDVWDSVSIISFPEKEQEDVLQTL

SEQ ID NO: 16729 - protein, 189 aa, Homo sapiens; identical to SEQ ID NO: 6725

SEQ ID NO: 16730 - protein, 187 aa, Homo sapiens; identical to SEQ ID NO: 6742

SEQ ID NO: 16731 - protein, 271 aa, Homo sapiens
MAKVPDMFEDLKNCYSENEEDSSSIDHLSLNQKSFYHVSYGPLHEGCMDQSVSLSISETSKTSKLTFKESMVVVATNGKVLKKRRLSLSQSITDDDLEAIANDSEEEIIKPRSAPFSFLSNVKYNFMRIIKYEFILNDALNQSIIRANDQYLTAAALHNLDEAVKFDMGAYKSSKDDAKITVILRISKTQLYVTAQDEDQPVLLKEMPEIPKTITGSETNLLFFWETHGTKNYFTSVAHPNLFIATKQDYWVCLAGGPPSITDFQILENQA

SEQ ID NO: 16732 - protein, 178 aa, Homo sapiens; identical to SEQ ID NO: 6848

SEQ ID NO: 16733 - protein, 578 aa, Homo sapiens; identical to SEQ ID NO: 16690

SEQ ID NO: 16734 - protein, 199 aa, Homo sapiens; identical to SEQ ID NO: 6850

SEQ ID NO: 16735 - protein, 422 aa, Homo sapiens; identical to SEQ ID NO: 6858

SEQ ID NO: 16736 - protein, 219 aa, Homo sapiens
MCPARSLLLVATLVLLDHLSLARNLPVATPDPGMFPCLHHSQNLLRAVSNMLQKARQTLEFYPCTSEEIDHEDITKDKTSTVEACLPLELTKNESCLNSRETSFITNGSCLASRKTSFMMALCLSSIYEDLKMYQVEFKTMNAKLLMDPKRQIFLDQNMLAVIDELMQALNFNSETVPQKSSLEEPDFYKTKIKLCILLHAFRIRAVTIDRVMSYLNAS

SEQ ID NO: 16737 - protein, 146 aa, Homo sapiens [sequence omitted]

SEQ ID NO: 16738 - protein, 427 aa, Homo sapiens; identical to SEQ ID NO: 6880

SEQ ID NO: 16739 - protein, 546 aa, Homo sapiens
MKNQDKKNGAAKQSNPKSSPGQPEAGPEGAQERPSQAAPAVEAEGPGSSQAPRKPEGAQARTAQSGALRDVSEELSRQLEDILSTYCVDNNQGGPGEDGAQGEPAEPEDAEKSRTYVARNGEPEPTPVVNGEKEPSKGDPNTEEIRQSDEVGDRDHRRPQEKKKAKGLGKEITLLMQTLNTLSTPEEKLAALCKKYAELLEEHRNSQKQMKLLQKKQSQLVQEKDHLRGEHSKAVLARSKLESLCRELQRHNRSLKEEGVQRAREEEEKRKEVTSHFQVTLNDIQLQMEQHNERNSKLRQENMELAERLKKLIEQYELREEHIDKVFKHKDLQQQLVDAKLQQAQEMLKEAEERHQREKDFLLKEAVESQRMCELMKQQETHLKQQLALYTEKFEEFQNTLSKSSEVFTTFKQEMEKMTKKIKKLEKETTMYRSRWESSNKALLEMAEEKTVRDKELEGLQVKIQRLEKLCRALQTERNDLNKRVQDLSAGGQGSLTDSGPERRPEGPGAQAPSSPRVTEAPCYPGAPSTEASGQTGPQEPTSARA

SEQ ID NO: 16740 - protein, 162 aa, Homo sapiens
MRISKPHLRSISIQCYLCLLLNSHFLTEAGIHVFILGCFSAGLPKTEANWVNVISDLKKIEDLIQSMHIDATLYTESDVHPSCKVTAMKCFLLELQVISLESGDASIHDTVENLIILANNSLSSNGNVTESGCKECEELEEKNIKEFLQSFVHIVQMFINTS

SEQ ID NO: 16741 - protein, 267 aa, Homo sapiens; identical to SEQ ID NO: 6891

SEQ ID NO: 16742 - protein, 1332 aa, Homo sapiens
MESHSRAGKSRKSAKFRSISRSLMLCNAKTSDDGSSPDEKYPDPFEISLAQGKEGIFHSSVQLADTSEAGPSSVPDLALASEAAQLQAAGNDRGKTCRRIFFMKESSTASSREKPGKLEAQSSNFLFPKACHQRARSNSTSVNPYCTREIDFPMTKKSAAPTDRQPYSLCSNRKSLSQQLDCPAGKAAGTSRPTRSLSTAQLVQPSGGLQASVISNIVLMKGQAKGLGFSIVGGKDSIYGPIGIYVKTIFAGGAAAADGRLQEGDEILELNGESMAGLTHQDALQKFKQAKKGLLTLTVRTRLTAPPSLCSHLSPPLCRSLSSSTCITKDSSSFALESPSAPISTAKPNYRIMVEVSLQKEAGVGLGIGLCSVPYFQCISGIFVHTLSPGSVAHLDGRLRCGDEIVEISDSPVHCLTLNEVYTILSHCDPGPVPIIVSRHPDPQVSEQQLKEAVAQAVENTKFGKERHQWSLEGVKRLESSWHGRPTLEKEREKNSAPPHRRAQKVMIRSSSDSSYMSGSPGGSPGSGSAEKPSSDVDISTHSPSLPLAREPVVLSIASSRLPQESPPLPESRDSHPPLRLKKSFEILVRKPMSSKPKPPPRKYFKSDSDPQKSLEERENSSCSSGHTPPTCGQEARELLPLLLPQEDTAGRSPSASAGCPGPGIGPQTKSSTEGEPGWRRASPVTQTSPIKHPLLKRQARMDYSFDTTAEDPWVRISDCIKNLFSPIMSENHGHMPLQPNASLNEEEGTQGHPDGTPPKLDTANGTPKVYKSADSSTVKKGPPVAPKPAWFRQSLKGLRNRASDPRGLPDPALSTQPAPASREHLGSHIRASSSSSSIRQRISSFETFGSSQLPDKGAQRLSLQPSSGEAAKPLGKHEEGRFSGLLGRGAAPTLVPQQPEQVLSSGSPAASEARDPGVSESPPPGRQPNQKTLPPGPDPLLRLLSTQAEESQGPVLKMPSQRARSFPLTRSQSCETKLLDEKTSKLYSISSQVSSAVMKSLLCLPSSISCAQTPCIPKEGASPTSSSNEDSAANGSAETSALDTGFSLNLSELREYTEGLTEAKEDDDGDHSSLQSGQSVISLLSSEELKKLIEEVKVLDEATLKQLDGIHVTILHKEEGAGLGFSLAGGADLENKVITVHRVFPNGLASQEGTIQKGNEVLSINGKSLKGTTHHDALAILRQAREPRQAVIVTRKLTPEAMPDLNSSTDSAASASAASDVSVESTAEATVCTVTLEKMSAGLGFSLEGGKGSLHGDKPLTINRIFKGAASEQSETVQPGDEILQLGGTAMQGLTRFEAWNIIKALPDGPVTIVIRRKSLQSKETTAAGDS

SEQ ID NO: 16743 - protein, 155 aa, Homo sapiens; identical to SEQ ID NO: 6899

SEQ ID NO: 16744 - protein, 866 aa, Homo sapiens; identical to SEQ ID NO: 6906

SEQ ID NO: 16745 - protein, 193 aa, Homo sapiens
MAAEPVEDNCINFVAMKFIDNTLYFIAEDDENLESDYFGKLESKLSVIRNLNDQVLFIDQGNRPLFEDMTDSDCRDNAPRTIFIISMYKDSQPRGMAVTISVKCEKISTLSCENKIISFKEMNPPDNIKDTKSDIIFFQRSVPGHDNKMQFESSSYEGYFLACEKERDLFKLILKKEDELGDRSIMFTVQNED

SEQ ID NO: 16746 - protein, 569 aa, Homo sapiens; identical to SEQ ID NO: 6962

SEQ ID NO: 16747 - protein, 271 aa, Homo sapiens; identical to SEQ ID NO: 16731

SEQ ID NO: 16748 - protein, 269 aa, Homo sapiens
MAEVPELASEMMAYYSGNEDDLFFEADGPKQMKCSFQDLDLCPLDGGIQLRISDHHYSKGFRQAASVVVAMDKLRKMLVPCPQTFQENDLSTFFPFIFEEEPIFFDTWDNEAYVHDAPVRSLNCTLRDSQQKSLVMSGPYELKALHLQGQDMEQQVVFSMSFVQGEESNDKIPVALGLKEKNLYLSCVLKDDKPTLQLESVDPKNYPKKKMEKRFVFNKIEINNKLEFESAQFPNWYISTSQAENMPVFLGGTKGGQDITDFTMQFVSS

SEQ ID NO: 16749 - protein, 153 aa, Homo sapiens; identical to SEQ ID NO: 6997

SEQ ID NO: 16750 - protein, 176 aa, Homo sapiens; identical to SEQ ID NO: 6998

SEQ ID NO: 16751 - protein, 553 aa, Homo sapiens; identical to SEQ ID NO: 7004

SEQ ID NO: 16752 - protein, 311 aa, Homo sapiens
MQTFTMVLEEIWTSLFMWFFYALIPCLLTDEVAILPAPQNLSVLSTNMKHLLMWSPVIAPGETVYYSVEYQGEYESLYTSHIWIPSSWCSLTEGPECDVTDDITATVPYNLRVRATLGSQTSAWSILKHPFNRNSTILTRPGMEITKDGFHLVIELEDLGPQFEFLVAYWRREPGAEEHVKMVRSGGIPVHLETMEPGAAYCVKAQTFVKAIGRYSAFSQTECVEVQGEAIPLVLALFAFVGFMLILVVVPLFVWKMGRLLQYSCCPVVVLPDTLKITNSPQKLISCRREEVDACATAVMSPEELLRAWIS

SEQ ID NO: 16753 - protein, 155 aa, Homo sapiens
MERIVICLMVIFLGTLVHKSSSQGQDRHMIRMRQLIDIVDQLKNYVNDLVPEFLPAPEDVETNCEWSAFSCFQKAQLKSANTGNNERIINVSIKKLKRKPPSTNAGRRQKHRLTCPSCDSYEKKPPKEFLERFKSLLQKMIHQHLSSRTHGSEDS

SEQ ID NO: 16754 - protein, 152 aa, Homo sapiens; identical to SEQ ID NO: 7032

SEQ ID NO: 16755 - protein, 229 aa, Homo sapiens; identical to SEQ ID NO: 4493

SEQ ID NO: 16756 - protein, 153 aa, Homo sapiens [sequence omitted]

SEQ ID NO: 16757 - protein, 825 aa, Homo sapiens; identical to SEQ ID NO: 7097

SEQ ID NO: 16758 - protein, 134 aa, Homo sapiens; identical to SEQ ID NO: 7105

SEQ ID NO: 16759 - protein, 420 aa, Homo sapiens; identical to SEQ ID NO: 7108

SEQ ID NO: 16760 - protein, 212 aa, Homo sapiens; identical to SEQ ID NO: 7120

SEQ ID NO: 16761 - protein, 468 aa, Homo sapiens; identical to SEQ ID NO: 7125

SEQ ID NO: 16762 - protein, 177 aa, Homo sapiens; identical to SEQ ID NO: 7141

SEQ ID NO: 16763 - protein, 521 aa, Homo sapiens
MGLGRCIWEGWTLESEALRRDMGTWLLACICICTCVCLGVSVTGEGQGPRSRTFTCLTNNILRIDCHWSAPELGQGSSPWLLFTSNQAPGGTHKCILRGSECTVVLPPEAVLVPSDNFTITFHHCMSGREQVSLVDPEYLPRRHVKLDPPSDLQSNISSGHCILTWSISPALEPMTTLLSYELAFKKQEEAWEQAQHRDHIVGVTWLILEAFELDPGFIHEARLRVQMATLEDDVVEEERYTGQWSEWSQPVCFQAPQRQGPLIPPWGWPGNTLVAVSIFLLLTGPTYLLFKLSPRVKRIFYQNVPSPAMFFQPLYSVHNGNFQTWMGAHGAGVLLSQDCAGTPQGALEPCVQEATALLTCGPARPWKSVALEEEQEGPGTRLPGNLSSEDVLPAGCTEWRVQTLAYLPQEDWAPTSLTRPAPPDSEGSRSSSSSSSSNNNNYCALGCYGGWHLSALPGNTQSSGPIPALACGLSCDHQGLETQQGVAWVLAGHCQRPGLHEDLQGMLLPSVLSKARSWTF

SEQ ID NO: 16764 - protein, 202 aa, Homo sapiens; identical to SEQ ID NO: 7856

SEQ ID NO: 16765 - protein, 1097 aa, Homo sapiens; identical to SEQ ID NO: 7860

SEQ ID NO: 16766 - protein, 240 aa, Homo sapiens
MEESVVRPSVFVVDGQTDIPFTRLGRSHRRQSCSVARVGLGLLLLLMGAGLAVQGWFLLQLHWRLGEMVTRLPDGPAGSWEQLIQERRSHEVNPAAHLTGANSSLTGSGGPLLWETQLGLAFLRGLSYHDGALVVTKAGYYYIYSKVQLGGVGCPLGLASTITHGLYKRTPRYPEELELLVSQQSPCGRATSSSRVWWDSSFLGGVVHLEAGEKVVVRVLDERLVRLRDGTRSYFGAFMV

SEQ ID NO: 16767 - protein, 435 aa, Homo sapiens; identical to SEQ ID NO: 8143

SEQ ID NO: 16768 - protein, 244 aa, Homo sapiens
MGALGLEGRGGRLQGRGSLLLAVAGATSLVTLLLAVPITVLAVLALVPQDQGGLVTETADPGAQAQQGLGFQKLPEEEPETDLSPGLPAAHLIGAPLKGQGLGWETTKEQAFLTSGTQFSDAEGLALPQDGLYYLYCLVGYRGRAPPGGGDPQGRSVTLRSSLYRAGGAYGPGTPELLLEGAETVTPVLDPARRQGYGPLWYTSVGFGGLVQLRRGERVYVNISHPDMVDFARGKTFFGAVMVG

SEQ ID NO: 16769 - protein, 554 aa, Homo sapiens; identical to SEQ ID NO: 3577

SEQ ID NO: 16770 - protein, 401 aa, Homo sapiens; identical to SEQ ID NO: 13563

SEQ ID NO: 16771 - protein, 252 aa, Homo sapiens; identical to SEQ ID NO: 9855

SEQ ID NO: 16772 - protein, 979 aa, Homo sapiens; identical to SEQ ID NO: 9857

SEQ ID NO: 16773 - protein, 277 aa, Homo sapiens
MCVGARRLGRGPCAALLLLGLGLSTVTGLHCVGDTYPSNDRCCHECRPGNGMVSRCSRSQNTVCRPCGPGFYNDVVSSKPCKPCTWCNLRSGSERKQLCTATQDTVCRCRAGTQPLDSYKPGVDCAPCPPGHFSPGDNQACKPWTNCTLAGKHTLQPASNSSDAICEDRDPPATQPQETQGPPARPITVQPTEAWPRTSQGPSTRPVEVPGGRAVAAILGLGLVLGLLGPLAILLALYLLRRDQRLPPDAHKPPGGGSFRTPIQEEQADAHSTLAKI

SEQ ID NO: 16774 - protein, 183 aa, Homo sapiens
MERVQPLEENVGNAARPRFERNKLLLVASVIQGLGLLLCFTYICLHFSALQVSHRYPRIQSIKVQFTEYKKEKGFILTSQKEDEIMKVQNNSVIINCDGFYLISLKGYFSQEVNISLHYQKDEEPLFQLKKVRSVNSLMVASLTYKDKVYLNVTTDNTSLDDFHVNGGELILIHQNPGEFCVL

SEQ ID NO: 16775 - protein, 616 aa, Homo sapiens; identical to SEQ ID NO: 13557

SEQ ID NO: 16776 - protein, 273 aa, Homo sapiens
MKKTQTWILTCIYLQLLLFNPLVKTEGICRNRVTNNVKDVTKLVANLPKDYMITLKYVPGMDVLPSHCWISEMVVQLSDSLTDLLDKFSNISEGLSNYSIIDKLVNIVDDLVECVKENSSKDLKKSFKSPEPRLFTPEEFFRIFNRSIDAFKDFVVASETSDCVVSSTLSPEKDSRVSVTKPFMLPPVAASSLRNDSSSSNRKAKNPPGDSSLHWAAMALPALFSLIIGFAFGALYWKKRQPSLTRAVENIQINEEDNEISMLQEKEREFQEV

SEQ ID NO: 16777 - protein, 293 aa, Homo sapiens
MSGLGRSRRGGRSRVDQEERFPQGLWTGVAMRSCPEEQYWDPLLGTCMSCKTICNHQSQRTCAAFCRSLSCRKEQGKFYDHLLRDCISCASICGQHPKQCAYFCENKLRSPVNLPPELRRQRSGEVENNSDNSGRYQGLEHRGSEASPALPGLKLSADQVALVYSTLGLCLCAVLCCFLVAVACFLKKRGDPCSCQPRSRPRQSPAKSSQDHAMEAGSPVSTSPEPVETCSFCFPECRAPTQESAVTPGTPDPTCAGRWGCHTRTTVLQPCPHIPDSGLGIVCVPAQEGGPGA

SEQ ID NO: 16778 - protein, 285 aa, Homo sapiens
MDDSTEREQSRLTSCLKKREEMKLKECVSILPRKESPSVRSSKDGKLLAATLLLALLSCCLTVVSFYQVAALQGDLASLRAELQGHHAEKLPAGAGAPKAGLEEAPAVTAGLKIFEPPAPGEGNSSQNSRNKRAVQGPEETVTQDCLQLIADSETPTIQKGSYTFVPWLLSFKRGSALEEKENKILVKETGYFFIYGQVLYTDKTYAMGHLIQRKKVHVFGDELSLVTLFRCIQNMPETLPNNSCYSAGIAKLEEGDELQLAIPRENAQISLDGDVTFFGALKLL

SEQ ID NO: 16779 - protein, 503 aa, Homo sapiens; identical to SEQ ID NO: 13181

SEQ ID NO: 16780 - protein, 567 aa, Homo sapiens; identical to SEQ ID NO: 14646

SEQ ID NO: 16781 - protein, 851 aa, Homo sapiens; identical to SEQ ID NO: 13184

SEQ ID NO: 16782 - protein, 390 aa, Homo sapiens
MPPSGLRLLLLLLPLLWLLVLTPGRPAAGLSTCKTIDMELVKRKRIEAIRGQILSKLRLASPPSQGEVPPGPLPEAVLALYNSTRDRVAGESAEPEPEPEADYYAKEVTRVLMVETHNEIYDKFKQSTHSIYMFFNTSELREAVPEPVLLSRAELRLLRLKLKVEQHVELYQKYSNNSWRYLSNRLLAPSDSPEWLSFDVTGVVRQWLSRGGEIEGFRLSAHCSCDSRDNTLQVDINGFTTGRRGDLATIHGMNRPFLLLMATPLERAQHLQSSRHRRALDTNYCFSSTEKNCCVRQLYIDFRKDLGWKWIHEPKGYHANFCLGPCPYIWSLDTQYSKVLALYNQHNPGASAAPCCVPQALEPLPIVYYVGRKPKVEQLSNMIVRSCKCS

SEQ ID NO: 16783 - protein, 414 aa, Homo sapiens; identical to SEQ ID NO: 13160

SEQ ID NO: 16784 - protein, 412 aa, Homo sapiens; identical to SEQ ID NO: 13162

SEQ ID NO: 16785 - protein, 233 aa, Homo sapiens; identical to SEQ ID NO: 16534

SEQ ID NO: 16786 - protein, 205 aa, Homo sapiens; identical to SEQ ID NO: 8093

SEQ ID NO: 16787 - protein, 933 aa, Homo sapiens; identical to SEQ ID NO: 13682

SEQ ID NO: 16788 - protein, 635 aa, Homo sapiens
MPSWALFMVTSCLLLAPQNLAQVSSQDVSLLASDSEPLKCFSRTFEDLTCFWDEEEAAPSGTYQLLYAYPREKPRACPLSSQSMPHFGTRYVCQFPDQEEVRLFFPLHLWVKNVFLNQTRTQRVLFVDSVGLPAPPSIIKAMGGSQPGELQISWEEPAPEISDFLRYELRYGPRDPKNSTGPTVIQLIATETCCPALQRPHSASALDQSPCAQPTMPWQDGPKQTSPSREASALTAEGGSCLISGLQPGNSYWLQLRSEPDGISLGGSWGSWSLPVTVDLPGDAVALGLQCFTLDLKNVTCQWQQQDHASSQGFFYHSRARCCPRDRYPIWENCEEEEKTNPGLQTPQFSRCHFKSRNDSIIHILVEVTTAPGTVHSYLGSPFWIHQAVRLPTPNLHWREISSGHLELEWQHPSSWAAQETCYQLRYTGEGHQDWKVLEPPLGARGGTLELRPRSRYRLQLRARLNGPTYQGPWSSWSDPTRVETATETAWISLVTALHLVLGLSAVLGLLLLRWQFPAHYRRLRHALWPSLPDLHRVLGQYLRDTAALSPPKATVSDTCEEVEPSLLEILPKSSERTPLPLCSSQAQMDYRRLQPSCLGTMPLSVCPPMAESGSCCTTHIANHSYLPLSYWQQP

SEQ ID NO: 16789 - protein, 281 aa, Homo sapiens [sequence omitted]

SEQ ID NO: 16790 - protein, 468 aa, Homo sapiens; identical to SEQ ID NO: 16514

SEQ ID NO: 16791 - protein, 440 aa, Homo sapiens; identical to SEQ ID NO: 16515

SEQ ID NO: 16792 - protein, 317 aa, Homo sapiens; identical to SEQ ID NO: 13609

SEQ ID NO: 16793 - protein, 249 aa, Homo sapiens; identical to SEQ ID NO: 13611

SEQ ID NO: 16794 - protein, 114 aa, Homo sapiens; identical to SEQ ID NO: 14356

SEQ ID NO: 16795 - protein, 114 aa, Homo sapiens; identical to SEQ ID NO: 14357

SEQ ID NO: 16796 - protein, 594 aa, Trichoplusia ni; identical to SEQ ID NO: 14487

SEQ ID NO: 16797 - DNA, 2488 bp, Ctenoplusia sp.
  source 1..2488: mol_type = other DNA
ccctagaagcccaatctacgtcattctgacgtgtatgtcgccgaaaatactctgtctctttctcctgcacgatcggattgccgcgaacgctcgattcaacccagttggcgccgagatctattggaggactgcggcgttgattcggtaagtcccgccattttgtcatagtaacagtattgcacgtcagcttgacgtatatttgggctttgtgttatttttgtaaattttcaacgttagtttattattgcatctttttgttacattactggtttatttgcatgtattactcaaatattatttttattttagcgtagaaaatacaatggcgtctcgtcaacatttataccaggatgaaatagcagcaatactggaaaatgaagatgattattctcctcacgataccgactctgaaatggaagattgtgttacccaagatgatgtcaggagtgacgttgaagacgagatggtggataatattggcaatggtacgagtccagcaagtaggcacgaggatcctgagacccctgacccgtcatcagaagcttctaatcttgaggtaactttatcttcacacagaattattatattacctcagcgttcgattcgtgaaaagaataatcacatttggtctacaacaaaaggtcagtcttctggtaggactgctgctataaatattgtacgtaccaatagaggacctactcgaatgtgtagaaacattgtcgatccattactctgctttcaactttttataaaagaagagattgttgaggaaattgtcaagtggacaaacgtggaaatggtacaaaaacgtgtaaacctgaaggacatctcagcaagttatagggataccaatgaaatggaaatctgggctattataagtatgctcaccttatcggccgttatgaaagacaatcatctgtctactgacgagttgttcaatgtctcctatggcactcgatacgtttcagtaatgagtcgagagagatttgaatttctattgcgattattgagaatgggtgataaattactgagaccaaatttacgccaagaggatgctttcacacctgtgagaaaaatatgggagatttttatcaaccaatgtagactgaattacgtacctggcactaacttgactgtcgatgaacagttgttaggttttcgcggccgttgtcctttccggatgtatattccgaacaaaccggacaaatatggtattaaatttcctatggtatgtgatgctgctacaaagtacatggtagatgctatcccttatctaggcaaaagcactaagacacaaggtctgccattaggcgagttttatgtgaaggagctgactcaaacagtacacggaacaaacagaaatgtcacttgtgacaactggttcacgtctgttccattagctaagagtttgctaaacagtccatataatttaacgctagtgggaaccatcaggtcaaacaagagggagataccagaagaagtcaagaactcacgttcgcggcaggtaggttcgtcaatgttttgttttgatggccctctgacattagtttcctataaacccaagccgtcaaagatggtattcttattatcatcatgtaatgaagatgccgtggtcaatcaaagtaatgggaagccggatatgatattattttacaatcagaccaaaggaggtgttgattcatttgaccagatgtgttcatctatgtcgacaaataggaagactaataggtggcctatggcagtcttttacggcatgttgaatatggcatttgtcaattcctacattatatactgccataacatgttggctaaaaaagaaaaacctctaagtcgcaaagattttatgaaaaaattaagcacagacttgacaacaccgtcgatgcaaaaacgtctggaggctcctactttgaagcggtccttacgtgataacataacaaatgttttaaaaattgtaccacaggcagccatagatacttcatttgatgaaccagagccgaagaaaaggcgctattgtggattttgctcatataaaaaaaagagaatgacaaagacacagtgcttcaagtgcaaaaaaccagtatgtggagagcacaatattgatgtttgtcaagactgcatataaagactgttttttttgtatttgcattatatattatattctaaagttgatttaattctaagaaaaacattaaaataagtttctttttgtaaaatttaattaattataagaaaaagtttaagttgatctcattttttataaaaatttgcaatgtttccaaagttattattgtaaaagaataaataaaagtaaactgagttttaattgatgttttattatatcattatactatatattacttaaataaaacaataactgaatgtatttctaaaaggaatcactagaaaatatagtgatcaaaaatttacacgtcatttttgcgtatgattgggctttataggttctaaaaatatgattgggcctctaggg

SEQ ID NO: 16798 - protein, 591 aa, Anopheles gambiae
MGDAMHVQWLSEETEEVPENEEDMLYEDVEYIEEYVHFPDGPESNVSGSVAVQNEESTGHVIKIESIDHAFDMLQNSVWSIKPPERTGTMGRKVAHPRPAPVGLAKSAKSPAECLSLFLDADVIAMITEYTNEQIKAEQPNYARERDANPTDEMEIMALLGVLYIAGTVRDGRENIERLFDTKMGTGLEAVYLTMTSLRYHFLIRSIRFDDPTAAPDEIEGDKLAPIRPIYERIVSNCQKYLRPGRFLMLDEQAVQFKGKCEFRQILPSAPGRAGFRFHLLVDCETSYVSNLEICVPENQNPYNLSYAPTDVAMRLTEPVQGRQKTVILGAGLTSIDLIEKLYASRTMAMGEVPKSYPDLPKALIANKGRPEHSTLAAYHDPATLVSYVTRRKEVMLLMSSFVDFDSEEQAGEQDEGEQHLKLVELYNRTKTTIRTIQQMCAKHNVVRSTRRWPVAVFFNLMNLSAINAWCIYCLNHPEEAKMSRRDFLVTMALELLRPQARRRLDSKTLPRLLRQRIGLFLGISREEYETVPVVERQGGESRGRCYLCGRARNKTTRISCHSCGKYTCNAHCAQLCRTCYMDDCASEQQE

SEQ ID NO: 16799 - protein, 565 aa, Anopheles gambiae
MADNLNNIPNCFPNNEDSSSDSDHDAKSDESDMENNIEEVMQASIMEELDEDSQEQATGRCVNALEARSSWKPWAGKQKPFPFFRKKRLRVDLPAKSTPYEIFSLILDDKLVAHIALAMNLYMEKKNAQKSKASKWLETNPKEVRKFIGLMIWMDLVRVGRLEDYWSESALYNFAVPRAAMYRERFRALLGAFCFYDDGTSKTDYKEPGKIGAFIDVLQSKFQALLHLGEDVVVREMLALGRDRTSFKQYIPASAHRHGRWALFKLCSLEGYTWGLKLCTEQRLIGEAQLANSVCMELCEPLLNQGRTVYIDNFHASFDLAQALLANQTHLVGTVRVNGSSMPKDVLLAKLRKGEIIARENDDGVMVLKWKGTCTMGLLSTKHSPALVPMESQVRSNRRWIRVARIQPEAVIAHIQAKGRPDRSDAIGPHITDLRKGMKWYKQVGLVLLLQVCVTNAWILHRMVTKKKLKLATFREQLVDQLVPLPNPTVERGLSGGEKKYTHHLEVRTDGNGRTVRRSCANCYAESRKTMSHYEAGRNKKATTTFCGSCPKQPQLCMPCFNKLH

SEQ ID NO: 16800 - protein, 500 aa, Anopheles gambiae
MFPLPSNCDPVFTMAALGPYVVIEPLDSEYVVNDTGPAACAEATPNTDGGGEPEQQSDDDDLICLWEEPQTFGIFDEPVGTNVPFDGADERTASEYAALVCDDALFDILVKGTNRHRKQWADCMRAGGQSVEPYRKVTVAEMKRYVGLLLVMGQVRKDCQHCYWSTNPLLETPVFANTMSYKRFQQISHYFHGMKQANRTYDAKPVLDHLVPKFQALYAPKQQLIVSELTIPQDVLNGQQTEPPNHSEDAQGSTPESAKRLRLLCESDTGYVLNVELANQQLDQVALTDVSIVRPYFGRWHHVYWGNDGITVAAAETLYANQTLACGTLRNDPDGTVAPERKSPVLVMDGQGKRILSTIHGAAAMQPTEGEPQGPPPACVADLNRHLADLERFEGLLVEEYLSNASVGWHIRTVLLLINVALLNAYILFSQTDTGSRFTFNVFRLAVAREWVGASEPLEEPTKFLPLIRGRKRKFLPLIPGRKRKETGLHNRVPKHPARN

SEQ ID NO: 16801 - protein, 577 aa, Aphis gossypii
MTVEQIRSLLQDISTETDCVDDQESDSDLSIEDVEVSDHESNSEQDFSDNESDLETSLGDSTFYIGKDKITKWQLKEFTTSKIRQHNIVNVVPGPKECARNIVSEIDAFLKIIDLDMIDEIVTCTNMYISNMRQRVQYSRPRDCLDTSRCEILAYFGLLFLIGIKKAHHANVKELWSADGSGTEITRATMSYKRFLFLCRCLRFDDRGTRAERRVIDKLSPIRTTFDLFLKNINKNYNLSEYTTIDEMLHPFRGRCQWIQYIPSKPAKYGIKMFALCDAKTFYTSKIEIYVGKQPPGPYEVSNSPIDIVKRLVTPIENSKRNLTTDNWYTSIPLADYLLQKKITLTGTLKKNKREIPTEFLPHKKKEVGSSVFGFQKNKTLVSYVPRKNKAVILLSTMHHDSKIDVETRKPEIIIDYNCTKGGVDTVDKMCAAYSVSRITKRWPLVIFYSLMNIAGINAQVLFSYSKHNNAPKIRRLFLKTLAFDLMKEHLAFRAQISSLPSDISSFLKIKYAVPSTSDVSTTPPSKRGTCFECGRKKNAATSMKCTKCMRFVCKLHSKKIIICEKCSNNDDNGNSE

SEQ ID NO: 16802 - DNA, 2634 bp, Aphis gossypii
  source 1..2634: mol_type = other DNA
ccttccagcgggcgcgctgttgtaaataatacaacagttttatatttattggtttattcaatttttattctatttttatcttatcggcggtcatgggtattcctctataatgttattatctacgttttagactatttttgaagtgtttcagttcattgtattgcagacaatcgacgaagtacttatagtgttgtcacaaaatacaacacgcgccattccgtgtacctacgccaaacacaaaacgcgtgttcggtgtacgcatcgttcgtcgtatctgacttattattttgtaatttttatttttgtgtggtaataaaaacaaaaatatgtaagtattgttttatatcactatgcaatatataatatatacattttaatttttcttacaatatgttttttttattatttgtatacgccaaacacaaaacgcgtgttcggtgtacgcatcgttcgtcgtatctgacttattattttgtaatttttatttttgtgtggtaataaaaacaaaaatatgtaagtattgttttatatcactatgcaatatataatatatacattttaatttttcttacaatatgttttttttattatttgtatacgtttttggtacgtactaataatcgatattatttatacaatgtcttaggtcggatcatatgacagttgaacaaattcgaagtttactgcaagacatttcaactgaaacagattgtgttgatgaccaggagagtgatagtgatctaagtatcgaagatgtggaggtaagtgaccacgaaagcaattctgaacaagatttttcagacaatgaatcagatctagagactagtttgggggacagtacattctacataggaaaagataaaataactaaatggcaactaaaagagtttacaacttcaaaaattaggcaacataatatagtaaacgtagttcctggtccaaaggagtgcgctagaaatattgttagtgagatagatgcatttctaaaaataattgatcttgacatgattgacgaaatcgtaacgtgcactaacatgtatattagtaatatgagacaacgagttcaatactctagaccccgagactgcttagatacttcaaggtgtgaaatactggcttattttggacttttatttttgattggtataaagaaagctcatcatgctaatgtaaaagaattatggtcggcggatggttctggtacagaaataactagggccactatgagctacaaaagatttttgtttttatgtcgctgcctcagatttgacgatcgcggaactagagctgaaagacgggtgattgataaactgtctcctattcgtactacgtttgacctttttttgaaaaatatcaataagaattataatttgagtgaatatactactattgacgaaatgttacacccatttcgtggtcggtgtcaatggatacagtatatcccaagtaaaccggccaaatatggcatcaaaatgtttgcattatgtgatgcaaaaacattttacacgagtaaaatagagatttatgttggaaaacaaccacctggtccgtatgaggtttctaattcaccaattgatatcgtaaaacgattagtaacacccatcgaaaactctaaacgaaatcttaccactgacaactggtataccagtattccacttgcagattacttattacaaaaaaaaattactctaactggaactttgaaaaaaaacaagcgagaaatacctacagaatttttaccacataaaaaaaaagaagttggttcgagcgtgttcgggtttcaaaaaaataaaacgttagtgtcatacgtacctcgaaaaaacaaggcagttattttgctttcaactatgcaccatgattcaaaaattgatgtagaaactcgtaaaccagaaataattatagattataattgtaccaaaggtggagttgatacagtagataaaatgtgcgcggcatattctgtctctagaattacaaaaaggtggccacttgtaattttttattctttgatgaatattgctggaataaatgctcaggtactgttttcatactctaaacataacaatgcccctaaaattagaagattatttttgaaaacattggcatttgatctaatgaaggaacatcttgcttttcgagctcaaatctcaagtttaccatcggacatatcatcttttttgaaaataaaatatgctgttccaagtacatcagatgtatctacaacccccccttcaaaacgaggaacttgcttcgaatgcgggagaaaaaaaaatgcggctacatctatgaagtgcaccaagtgtatgcgatttgtatgtaagctacattcaaaaaaaattattatttgtgaaaagtgttctaataacgatgacaatggcaattctgaataatttcttactgtaaacaaatactaaaaataattttaatttttgatgtaataataataagacgtattgattttttaataaaacataattataatagtatttaaataaaaacaactttgtgaacgtacctattgtttattttattattagatataatatgtacgactatcacagcatattaggactgttgtaaaatttacaacgcgcgactactcttgtttcaaataatggcgcgcccgctggaagg

SEQ ID NO: 16803 - protein, 545 aa, Acyrthosiphon pisum
MISDEDILLHLDEIIANEDEFIDDINFDIENNDIEVTELEVTDPPSPDHSPIVQRNFRPKEHYFDSSKCGVQKHEFGLNSNSSKLEFFKAFVSEFLLGKVAFETNRYAKQYIQSNEISHQSRVNAWKDTNVDEMYTFLATTILMSRNKKLDMKDYWSTDPLLSSPIFRQIISRNRYLLLHQMLHFCNNENQEKGNRLFKLDVVLDEIRTNFKAGMVPFQNIVIDESLVLWKGRLSFKQFIKTKRHRFGIKFFVLCDVETDFILDFIIYTGTETRLLPYDANIGISGAVVKTLIAPYLNKGYNLYTDNWYTSPILAQYLYKKKTTITGTVRKNRRGMPELKNKLAVGDVQSAHSKNIMVLKWVDRREVFMLSTKFDSNLDNSGKFDRKGNLVKKPICVINYNQCMGSIDKTDMLLSSVECVRKTSKCILNAFSAFKTVTGQNMPLANFQLEVIRQLLEKYGGNTVSPRGRPCTKDQPFRLSARHFPSDVKKLASGKVQRRKCIVCTRNNKRKDTMYMCQECDVGLCATPCFAIYHTKQNYLAVQLF

SEQ ID NO: 16804 - DNA, 2476 bp, Agrotis ipsilon
  source 1..2476: mol_type = other DNA
ccctagaagcccaatctacgtaaatttgacgtataccgcggcgaaatatatctgtctctttcacgtttaccgtcggattcccgctaacttcggaaccaactcagtagccattgagaactcccaggacacagttgcgtcatctcggtaagtgccgccattttgttgtaatagacaggttgcacgtcattttgacgtataattgggctttgtgtaacttttgaaattatttataatttttattgatgtgatttatttgagttaatcgtattgtttcgttacatttttcatatgatattaatattttcagattgaatataaaatggagtcccgtcaacggctaaaccaggacgaaatagctacaattttagaaaatgatgacgattattctccactggattcggactccgaggcagaagatcgtgtagttgaagatgatgtctggagtgataacgaggacgcgatgatcgactacgttgaagatacaagcaggcaagaggaccccgataacaatattgcttctcaggaatcggctaatcttgaggtaacttcgttgacttcacaccgaataattagtttgcctcagcggtcaatatgtggaaaaaacaaccatgtatggtcaactacaaagggacgtacgacgggcaggacttctgctatcaatataatacgcacaaataggggaccaacgcgaatgtgtcgcaatattgttgatccattgctttgttttcaactttttataacggatgagataattcatgaaatagttaagtggacaaacgtcgagatgatagtaaaacgtcaaaatttgatagacatttcagcaagctacagggatacaaatacaatggagatgtgggcgttagtcggcattctcactctgacggcagttatgaaagataaccacttatcaactgatgagttgtttgacgctacattctctggcaccagatacgtatcagtaatgagccgagagagattcgaattcctaataagatgtatgagaatggacgacaaaacactgcgaccaactcttcgtagcgatgatgcttttataccggtgagaaaactatgggagatttttatcaatcaatgcagactaaactacgttcctggcggtaacttgactgtagatgagcaattgttgggttttcgcggccgttgtccattccggatgtatattcccaacaaacctgataaatatggcataagattccccatgatgtgtgacgctgccacaaagtacatgatagatgccataccgtaccttggtaaaagtacaaaaacaaatggtttaccactgggcgagttttatgtaaaagagctgactaaaacagtacacggcacaaatagaaatgttacctgcgacaactggttcacgtctatcccattagcgaagaacatgctccaggctccatacaacctaacaatagtaggaaccatcaggtctaacaaaagagaaatacctgaagagatcaagaattctcgatcacggccggtaggatcctcaatgttttgctttgatggccctttgaccttggtttcgtataaaccaaagccgtcaagaatggtatttttattgtcttcctgtgatgaaaatgccgttatcaatgaaagtaacggaaaaccggacatgatattgttttataatcaaacaaaaggcggtgttgattcctttgaccagatgtgtaagtctatgtctgctaacaggaaaactaataggtggccgatggcggtcttttatggcatgttgaatatggcgtttgtgaattcctatataatatactgtcacaataagataaataaacaaaaaaaaccgataaaccgcaaagaatttatgaaaaatttaagtacagatctgacgacaccttggatgcaagaacgactaaaagcacctactttgaagaggactctacgcgacaatataacaaatgttttaaaaaatgtggtaccgccatctccggctaataatagtgaggagccaggaccaaagaaacgaagctattgtggattttgttcatataaaaaaaggcggatgaccaagacgcagttttacaaatgcaaaaaggctatatgtggagaacacaatattgacgtttgtcaagactgtgtataaagactgttttttttaaaaggcttataaagtattactattgcgtgatttaattttataaaaatatttaaaaccagttgatttttttaataattacctaattttaagaaaaaatgttagaagcttgatatttttgttgatttttttctaagatttgattaaaaggccataattgtattaataaagagtatttttaacttcaaatttattttatttattaattaaaacttcaattatgataatacatgcaaaaatatagttcatcaacagaaaaatataggaaaactctaatagttttatttttacacgtcatttttacgtatgattgggctttatagctagtcaaatatgattgggcttctaggg

SEQ ID NO: 16805 - protein, 505 aa, Chilo sp.
MIQGQIMVSDTEEEPSDSTGRTKRRRTYAWRKRDLAKNPVNWPDVQGACQDKRPIEWFENFLDEDVISLLVSESNKYAVKKNLPGDITTEDMKCFIGILLVSGYSWLPRRRMYWENSPDTKNELISSAMTRDRFDFIFRHLHVNDNLDLQDKYTKVRPLVTLLNKKFLEFSPLEEHYSVDEAMIPYYDRHGCKQHIKGKPIRYGFKAWVGATRLGYVLWMEPYQGATTMCNPIYKELGLGASVVLTFCDVLISRGFDLPYHVVFDNFFTGTPLLEEITKKGLRCTGTVRENRTSSCPLITSKLLKKKERGAVDYRTTHDNTFIIAKWHDNNIFSIASNAVGINPKQSAKRFSQSEKRNIVIEEPHMVSIYNKYMGGVDRSDENISHYRIGIRGKKWYMPLLTHMIDLAEHNAWQLYKINHGKLDHLGFRRRVAIALIESNRKNAKRGPSRPSHHEHADSRKDQMNHLVIPQSKQTHCRQCHKKCLTRCKKCDVGVCVKCFETYHS

SEQ ID NO: 16806 - DNA, 2406 bp, Chilo sp.
  source 1..2406: mol_type = other DNA
cccagattagcctactgtcctatatttaggacagtagaaataaaaaaaaatatcagaataccctctttatctaagattatttagtcttatgatttgcagtaagaaacgtgtcagctttattagaaaaaataaaaagacagttattttaacagtttttaccttataagtgtgtaataaaagtgcgttgcagacatggcaaatgacaggtatgtataaaaagttatattttactcgtgagttgtttttttctgtgttaatatctagttgataaccttaacttttgtactaaataaatattctagcaaaataatataaataaattacgtataacttgttacaaatactagcgtactatatataggacagtaggataatatacatgattttagtacaataatacaactttttctttacagaccgttagctgcgcatgaaattttagatgctttagaaaatgtttctgataatgaagaagattatagagaacgactgatatgtattctacctcctcctgttgatcctgcctgtctcactgacgaagattcgggtgaataagataatgtaactttgaataatttgccacgaaacattctgcttcaaccggctgaagtaatgattcaagggcagattatggtgagtgatacagaagaagaaccttctgattctacaggtcgaactaaacgtaggcgtacctacgcatggagaaaacgggacttggcaaaaaatcccgtgaattggccagatgttcaaggcgcttgccaagataagcgcccaattgagtggtttgaaaacttcttagatgaagatgttatttcgttgttggtgtcagagagcaataaatatgctgtcaaaaagaatttgcctggagacataaccactgaagatatgaaatgtttcatcggcatattgttggttagtggttattcatggctcccccgtagaagaatgtattgggaaaactcccctgatacaaagaatgaattgatcagctcggctatgactagggatagatttgactttatttttcgccaccttcatgtcaatgataatctggatttgcaagacaaatacacaaaagtacgccccctagttacacttctaaataaaaagttcttagagttttctcctcttgaagagcattacagtgtagatgaggccatgatcccctactatgatagacatggctgcaaacagcacataaaaggtaaacctattaggtacgggttcaaagcttgggttggtgctacacggttagggtatgttttatggatggaaccataccaaggtgctacaactatgtgcaatccaatatataaagaattggggctgggtgcaagcgttgttctcactttttgcgatgtgctgatttcacgtggcttcgaccttccttaccacgtagtttttgataatttttttactgggacgcccttgctggaagagataacaaagaaaggccttcgttgcactgggacagttcgagaaaacaggacatctagttgtcctctgattacatcgaagttactgaaaaaaaaggaacgtggtgctgtcgattacagaacgacacatgacaacacgttcattattgctaaatggcatgacaataatatattcagtattgcttctaatgctgtaggaataaatcctaaacaatctgccaaacgcttctcacaaagtgaaaagagaaacattgtcatagaagaaccacatatggtgtccatctataacaaatatatgggaggagtggatcggtctgatgaaaatatttcacattaccgaattggtatacgaggtaagaaatggtacatgccgttgctcacacacatgattgatcttgccgaacataatgcatggcagttatataaaataaatcatggaaaactggatcatcttggctttcgcagaagggtagcaattgctttgattgaatcaaacagaaaaaatgccaaaagagggcctagccgaccctcccatcatgaacatgctgatagtcgtaaagaccaaatgaatcatctggttattcctcaatcgaagcaaacacactgtcgtcaatgtcacaaaaaatgtttgacacgttgcaagaaatgtgatgttggagtgtgtgtcaagtgttttgaaacatatcattcataaatagtgttaatctagtaaattacatataacaatgggtaatataatcaatagttatctaataaactacactttttgattacattctgttttgtcataaatggtcttttatttcctcttattatcctactgtcctacatataggacggctgtttccctgaaagccttacacttaatttttttttcataattttttttatgttgcataagatctaataaactaaataatgtaacttttttgaaaattttcagaaaattttagtttcaggcttatctggg

SEQ ID NO: 16807 - protein, 622 aa, Drosophila melanogaster
MSSSGRKRKQQLKPRQDDHRSPVKRRSVDIKSEPLDGYPALADYDLSTADIKPDLTELQLQLVAEQQAASNTIRLELEQQESDSDEDGYSELDYQAEDVFCQDDMDDYDPDWSSQQTGSRLLFKFPIQQSGLKFGQRFQGPQHYFNQVLGNRSKFFSSLAQSCNLKGGELKSNPTTAEEMEIFMALSLLMCDLKLEHLSDYWSTNMFYGLVGFSGKIPLERYQQLLHCLNFDAPQLQAGRAKVKNSLLLDFINERMEEIYICGQQLVLNEPITLWKGALRYQDELPNKFRTNALLLHMLTEQSGLVVKILPEIVRKEDAPAWVRNSRQLVEHRNKIVLKLMEGYHGGRTVYTSKFYGSYGLAQELAKKSTYCTGLLDRNRYGNSKALVHQRLDSNSISTSYATSLMMAKWRRRAKSLYCFSSDCLAIYSKEMAMQKTNAKPKLIQELEFQLRPGNDGRHHLIHYQAACKELKANIKLTIFLLNILVYNAYLLYFANGQNARVGHLKSYSEFRVIIIKSLLREEVTNEPVTSIQKPETYERSKNKPVPEPRLKTILHEPMLIQQNGKPAKKNCRYCHKGGMLQFSRYMCNTCPDKPGLCQEPCFLLWHEQLKKVIRQTIGRSE

SEQ ID NO: 16808 - protein, 581 aa, Heliothis virescens
MSKMASKRLSNTQIVDVLEDDEECIIDSPDEDEVDAEVIQSDHNSESQESANEIDSEWSDTDNEPLSRLASEDSDNFYFSKNKCTKWAKEPPRTSVRVRRHNIMRETPGPKGRAKEIQTISEAFFCMFSMDTVNLVLQQTNDYIKSIQEKFQRERDCKVLEYEELLAYLGLLYMSGVLRSSHLNFKDLWATDGTGIEFFQNTMSFNRFLFISRCVRFDDKNTKSERLKTDKLAAVREFTDLMNNNFINNYCASENVTLDEQLPAFRGRFSGVVYMPNKPTKYGIKHYALVDSATFYLLKFEIYAGVQPEGPYRMPNDTVSLVKRMTEPIWGTGRNVTMDNWFTSVPLANILLKDHQLTMVGTIRKNKPEIPTCFQPKRTRTEHSSLFGFQEDVTLCSYVPKKSKAVLLISSMHNDNNIVESEKKKPEIILYYNSTKGGVDTNDQMCANYNVGRRTKRWPMVIFYHLLNVAGINAYVIFKNKIDHGISRREFLKHLAVDLVKVHQQTRSNIPQLPRAVQKRLKRNAEVQDPGSTSRGGPSTSYKRCHICPRSKDKKIRFMCAKCHHHICHDHSTMICDKCID

SEQ ID NO: 16809 - protein, 594 aa, synthetic construct
MGSSINDEHILSALLQSDDELVGEDSDSEISDHVSEDDVQSDTEEAFIDEVHEVQPTSSGSEILDEQNVIEQPGSSLASNRTLTLPQRTIRGKNKHCWSTSKSTRRSRVSALNIVRSQRGPTRMCRNIYDPLLCFKLFFTDEIISEIVKWTNAEISLKRRESMTGATFRDTNEDEIYAFFGILVMTAVRKDNHMSTDDLFDRSLSMVYVSVMSRDRFDFLIRCLRMDDKSIRPTLRENDVFTPVRKIWDLFIHQCIQNYTPGAHLTIDEQLLGFRGRCPFRMYIPNKPSKYGIKILMMCDSGTKYMINGMPYLGRGTQTNGVPLGEYYVKELSKPVHGSCRNITCDNWFTSIPLAKNLLQEPYKLTIVGTVRSNKREIPEVLKNSRSRPVGTSMFCFDGPLTLVSYKPKPAKMVYLLSSCDEDASINESTGKPQMVMYYNQTKGGVDTLDQMCSVMTCSRKTNRWPMALLYGMINIACINSFIIYSHNVSSKGEKVQSRKNFMRNLYMSLTSSFMRKRLEAPTLKRYLRDNISNILPNEVPGTSDDSTEEPVTKKRTYCTYCPSKIRRKANASCKKCKKVICREHNIDMCQSCF

SEQ ID NO: 16810 - DNA, 2472 bp, synthetic construct
  source 1..2472: mol_type = other DNA
ccctagaaagatagtctgcgtaaaattgacgcatgcattcttgaaatattgctctctctttctaaatagcgcgaatccgtcgctgtgcgtttaggacatctcagtcgccgcttggagctcccgtgaggcgtgctcgtcaatgcggtaagtgtcactgattttgaactataacgaccgcgtgagtcaaaatgacgcatgattatcttttacgtgacttttaagatttaactcatacgataattatattgttatttcatgttctacttacgtgataacttattatatatatattttcttgttatagatatcgtgactaatatataataaaatgggtagttctataaacgatgagcatatcctctctgctcttctgcaaagcgatgacgagcttgttggtgaggattctgacagtgaaatatcagatcacgtaagtgaagatgacgtccagagcgatacagaagaagcgtttatagatgaggtacatgaagtgcagccaacgtcaagcggtagtgaaatattagacgaacaaaatgttattgaacaaccaggttcttcattggcttctaacagaaccttgaccttgccacagaggactattagaggtaagaataaacattgttggtcaacttcaaagtccacgaggcgtagccgagtctctgcactgaacattgtcagatctcaaagaggtccgacgcgtatgtgccgcaatatatatgacccacttttatgcttcaaactattttttactgatgagataatttcggaaattgtaaaatggacaaatgctgagatatcattgaaacgtcgggaatctatgacgggtgctacatttcgtgacacgaatgaagatgaaatctatgctttctttggtattctggtaatgacagcagtgagaaaagataaccacatgtccacagatgacctctttgatcgatctttgtcaatggtgtacgtctctgtaatgagtcgtgatcgttttgattttttgatacgatgtcttagaatggatgacaaaagtatacggcccacacttcgagaaaacgatgtatttactcctgttagaaaaatatgggatctctttatccatcagtgcatacaaaattacactccaggggctcatttgaccatagatgaacagttacttggttttagaggacggtgtccgtttaggatgtatatcccaaacaagccaagtaagtatggaataaaaatcctcatgatgtgtgacagtggtacaaagtatatgataaatggaatgccttatttgggaagaggaacacagaccaacggagtaccactcggtgaatactacgtgaaggagttatcaaagcctgtgcacggtagttgtcgtaatattacgtgtgacaattggttcacctcaatccctttggcaaaaaacttactacaagaaccgtataagttaaccattgtgggaaccgtgcgatcaaacaaacgcgagataccggaagtactgaaaaacagtcgctccaggccagtgggaacatcgatgttttgttttgacggaccccttactctcgtctcatataaaccgaagccagctaagatggtatacttattatcatcttgtgatgaggatgcttctatcaacgaaagtaccggtaaaccgcaaatggttatgtattataatcaaactaaaggcggagtggacacgctagaccaaatgtgttctgtgatgacctgcagtaggaagacgaataggtggcctatggcattattgtacggaatgataaacattgcctgcataaattcttttattatatacagccataatgtcagtagcaagggagaaaaggttcaaagtcgcaaaaattttatgagaaacctttacatgagcctgacgtcatcgtttatgcgtaagcgtttagaagctcctactttgaagagatatttgcgcgataatatctctaatattttgccaaatgaagtgcctggtacatcagatgacagtactgaagagccagtaacgaaaaaacgtacttactgtacttactgcccctctaaaataaggcgaaaggcaaatgcatcgtgcaaaaaatgcaaaaaagttatttgtcgagagcataatattgatatgtgccaaagttgtttctgactgactaataagtataatttgtttctattatgtataagttaagctaattacttattttataatacaacatgactgtttttaaagtacaaaataagtttatttttgtaaaagagagaatgtttaaaagttttgttactttatagaagaaattttgagtttttgtttttttttaataaataaataaacataaataaatggtttgttgaatttattattagtatgtaagtgtaaatataataaaacttaatatctattcaaattaataaataaacctcgatatacagaccgataaaacacatgcgtcaattttacgcatgattatctttaacgtacgtcacaatatgattatctttctaggg

SEQ ID NO: 16811 - DNA, 2464 bp, synthetic construct
  source 1..2464: mol_type = other DNA
ccctagataactaaacattcgtccgctcgacgacgcgctatgccgcgaaattgaagtttacctattattccgcgtcccccgcccccgccgctttttctagcttcctgatttgcaaaatagtgcatcgcgtgacacgctcgaggtcacacgacaattaggtcgaaagttacaggaatttcgtcgtccgctcgacgaaagtttagtaattacgtaagtttggcaaaggtaagtgaatgaagtatttttttataattattttttaattctttatagtgataacgtaaggtttatttaaatttattacttttatagttatttagccaattgttataaattccttgttattgctgaaaaatttgcctgttttagtcaaaatttattaacttttcgatcgttttttagatggatttgagaaaacaagatgagaaaatacgtcaatggcttgagcaagatattgaggaggacagtaagggagagtcagacaattcaagttcggaaacggaagatattgtggagatggaagttcacaaaaatacgagcagcgaatctgaagtttccagcgagtccgattacgaacccgtttgcccaagtaagagacagagaacgcaaattattgaatcagaggaatctgataactccgaaagtattcgcccaagcagaagacagacaagtcgggttattgattcggacgaaactgatgaggatgtaatgagctccactcctcagaatatccctcgtaatccgaatgttattcagccaagttccagattcctttatggtaaaaataaacacaaatggtcgtcagcagccaaaccatcttctgtgcgaacttctagaagaaacatcatacattttataccaggaccaaaagaaagagcaagggaagtttctgaaccaattgatatattttccctgtttataagcgaagatatgttgcaacaagtcgtgacatttactaatgcagagatgcttattagaaaaaataagtataaaaccgagacgtttactgtatctcctaccaatttggaagaaataagagctttgcttggtttattgttcaatgcagcagctatgaaaagtaatcatttaccaactcgcatgcttttcaatactcatcgatcaggaacgattttcaaagcttgtatgagcgcagaacgattaaattttcttatcaaatgcctccgatttgatgacaagcttacaagaaatgtaagacagcgagatgataggtttgcacctatacgtgacttgtggcaagcattgatatctaactttcagaaatggtacactccagggtcctatattaccgtagacgaacagctggtcggatttcgaggaagatgttcatttaggatgtatattccaaacaagcctaataaatacggaataaaacttgttatggctgcagatgtaaacagcaaatatatagtgaatgccattccgtacttgggaaaaggaactgatcctcaaaatcaaccgttggctacgttttttataaaagaaataacgtctacattacatggcacgaatcgaaacataaccatggacaactggttcacgtctgttcccttagctaacgagctgttgatggcaccttataatttgacattagtgggaactctaagaagtaataaacgagaaattcctgaaaaactcaaaaattctaagtcacgcgcaattggtacttcgatgttttgttacgatggtgataagacattagtttcatacaaagccaaatctaataaagttgttttcatcttgtctacaattcatgatcaacctgacatcaatcaagaaacaggaaaaccagaaatgattcatttctacaacagtacaaagggtgcagtagataccgtggaccaaatgtgctccagcatttccaccaacagaaaaacccaaagatggcctttgtgcgtgttttataacatgttgaatctatcgattatcaatgcgtacgttgtatacgtttataataatgttagaaataataaaaaacctatgtctcggcgtgacttcgttataaaactaggagaccaacttatggagccctggctgcggcagcggttgcagacggtgactttgagacgtgatatcaaggtcatgatacaagatatcttaggggagtcttctgatctagaagcccctgttccttctgtgtctaatgtgcgtaaaatctactacctatgtccttccaaagcccgaagaatgacaaaacaccgatgcattaaatgcaaacaggctatttgcgggccccataatattgacatatgtagtcgctgtattgaatagtttcactaagtaattttgttcctatttagtagataagtaacacataattattgtgatattcaaaacttaagaggtttaataaataataataaaaaaaaaatggtttttatttcgtagtctgctcgacgaatgtttagttattacgtaaccgtgaatatagtttagtagtctaggg

SEQ ID NO: 16812 - protein, 449 aa, Tribolium castaneum
MDIFRLVDLAAAYDGTATGFEIDVWRPTMNTTNVYPVHAIKMAENDNYVGLSKEEVSALKELITTAESEEDSDIETELENVNDCWSTDPLLHTPIFSKVMPRDRYLLLLRLLHFCDNTKQKKGERTFKIDLVMSFLSNRFKVLFTPFENLCIDESLVLWKERLSFKQYIKSKRHRFGVKMFVLCNVETDYILGFIVYTGSQTKIKPSDLGISGSVVLTLLEDYLDKGHNLYIDNWHSSPELALHLYQHKTNVCGTVRTNRRHMPKLPDPKVKGDIESQHTAEMMTGKVDRTSKEEVKKPTCIVDYNANMGSVDKVDMLLSSVECLRKTIKWYKKIFFHLVDLCMINAHAMYKLEVIRQIVKKYAKIQKTSKKGRPSSGDNPLRLIGRHFPQKIPPVPGGKKTCQRICFVCKHTQRGVSRRRDTSYQCAECDKALCLIPCFEVYHTKQIF

SEQ ID NO: 16813 - protein, 487 aa, Daphnia pulicaria
MQKKADAKKVAQHKAANRNWKECKVWGDVGRQSRADDDSPRPQFQERAIQFAPLEEPGPVLSQFNRFSNPLGVFKSMLGGEDTLYLLREATNDYIAEFWSSRKTPPSRKVGGKPEGRLIGPRLPAGGFVTDHELVAFFGIQFLIGYHRLPELSMFWEQQPDAGLGLGIIQQAMTRERFKFISKHIACASPWDDVDPNSDDPDQEPERPDPIRKIRPLVKRLNERYHACRKPPRGQSIDESMVKFKGRSVLRQTMKNKPIKSGFKIWSRCCHRGYTYKFEIYQGARFGEKQGRSRNNEAVERVVVDLCQPLTDQGFVVAFDRFFTSIALLDKLRENGVNAVGTILPSRVNQPIMTKNESNLRPDEFAAKFGGEPGTCRKGIFVWRDTKAFRVASNYHGSNLVKVRRKQRDGSFKTKSCPKAIDDYVNNMGGVDTANQLRSYYERDRKAKKWWHRLLYSLLETCLVNSWICFNDMVRSQMAEIKTSNTQ

SEQ ID NO: 16814 - protein, 585 aa, Homo sapiens
MSNPRKRSIPMRDSNTGLEQLLAEDSFDESDFSEIDDSDNFSDSALEADKIRPLSHLESDGKSSTSSDSGRSMKWSARAMIPRQRYDFTGTPGRKVDVSDITDPLQYFELFFTEELVSKITRETNAQAALLASKPPGPKGFSRMDKWKDTDNDELKVFFAVMLLQGIVQKPELEMFWSTRPLLDTPYLRQIMTGERFLLLFRCLHFVNNSSISAGQSKAQISLQKIKPVFDFLVNKFSTVYTPNRNIAVDESLMLFKGPLAMKQYLPTKRVRFGLKLYVLCESQSGYVWNALVHTGPGMNLKDSADGLKSSRIVLTLVNDLLGQGYCVFLDNFNISPMLFRELHQNRTDAVGTARLNRKQIPNDLKKRIAKGTTVARFCGELMALKWCDGKEVTMLSTFHNDTVIEVNNRNGKKTKRPRVIVDYNENMGAVDSADQMLTSYPSERKRHKVWYKKFFHHLLHITVLNSYILFKKDNPEHTMSHINFRLALIERMLEKHHKPGQQHLRGRPCSDDVTPLRLSGRHFPKSIPATSGKQNPTGRCKICCSQYDKDGKKIRKETRYFCAECDVPLCVVPCFEIYHTKKNY

SEQ ID NO: 16815 - protein, 409 aa, Mus musculus
MPPSASAVDFFQLFVPDNVLKNMVVQTNMYARKFQERFGSDGAWVEVTLAEMKAFLGYVISTSVSHCESVLSIWSGGFYSNRSLALVMSQARFEKILKYFHVVAFRSSQTTHGLYKVQPFLDSLQSGFDAAFRPSQTQVLHEPLIDEDPVFIATCTERELRKRKKRKFSLWVRQCSSTGFIIQIYVHLKEGGGPDGLDALKNKPQLHSMVARSLCRNAAGKNYIIFTGPSITSLNLFEEFEKQGIYCCGLLSSRKSDCTGLPPSMLTNPATPLARGQHQIRTKGNMSLICWYNKGHFRFLTNAYSPVQKGVIIKRRSGEIPCPLAVEAFAAHLSYICRYDDKYSKYFISHKPNKTWQQVFWFAISIAVNNAYILYKMSDAYHVKKYSRAQFGERLVRELLGLEDSSPAH

SEQ ID NO: 16816 - protein, 704 aa, Macaca fascicularis
MRPEAEGDSEGEESEYFPTEEEEEEEEDDEVEGVEADLSGDGTDYELKPLPKGRKRQKKVPVQEIDDDFFPSSGEEAEASPIGEGGGGGRKVGRYRDDGDEDYYKQRLSPKMPRTLSLHEITDLLETDDSIEASAIVIQPPENATAPVSDEESGDEEGGTINNLPGSLLHTAAYLIQDGSDAESDSDDPSYAPKDDSPDEVPSTSSVQQPPPSRRRKMTKIVCKWKKADLTVQPVAGRVTAPPNDFFTEMRTPTEILELFLDDEVIELIVKYSNLYADSKGVHLGLTSSEFKCFLGIIFLSGYVSVPRRRMFWEQRTDVHNVLVSAAMRRDRFETIFSNLHVADNADLDPVDKFSKLRPLISKLNERCMKFVPNETYFSFDEFMVHYFGRHGCKQFIRGKPIRFGYKFWCGATCLGYICWFQPYQGKNPNTKHEEYGVGASLVLQFSEALTEAHPGRYHFVSNNFFTSIALLDKLSSMGHQATGTVRKDHIDKVPLESDVALKKKERGTFDYRIDGKGNIVCRWNDNSVVTVASSGAGIHPLCLVSRYSQKLKKKIQVQQPNMIKVYNQFMGGVDRADENIDKYRASIRGKKWYSSPLLFCFELVLQNAWQLHKTYDEKPVDFLEFRRRVVCHYLETHGHPPEPGQKGRPQKRNIDSRYDGINHVIVKQGKQTRCAECHKNTAFRCEKCDVALHVKCSVEYHTE

SEQ ID NO: 16817 - DNA, 2511 bp, Macaca fascicularis
  source 1..2511: mol_type = other DNA
ttggcagatcaagcaaaactgtcttttgaaaggaaggagcaagctacttgtaataaaagaccagctagaaaagctccagcctcagtcacgcctccggccccaacacaaagtaaaaacaaaccaaacaagaaagccaaagttctgtccaaaaaagaggagcgtttgaaaaagcacatcaagaaactccagaagagggctttgcagttccaggggaaagtgggattgccaaaggcaaggagaccctgggagtcagacatgaggccagaggcagagggagactctgagggtgaagagtctgagtatttccccacagaggaggaggaggaggaggaggaagatgacgaggtggagggggtggaggcagacctctctggagacggtactgactatgagctgaagcctctgcccaagggccggaaacggcagaagaaagtcccagtgcaggagattgacgacgactttttcccaagttctggggaagaagctgaagcttctcctataggagaaggaggaggaggaggtcggaaagtaggaagataccgagatgatggagatgaagattattataagcagcggttaagtcccaagatgcctcgaacactaagtttacatgaaataactgaccttttagagacagatgacagcatagaagcaagtgctatagtgatacaaccacctgaaaatgctacagcacctgtttcagatgaggaatcaggagatgaagaaggtggaacaataaataatctgccaggttctttgttgcacacagctgcgtatcttattcaagatggctctgatgctgagtctgactcagatgatccctcatatgcacctaaagatgactctcctgatgaagttccatctacgtcttctgtgcagcaacctccaccatcaaggaggaggaaaatgacaaaaattgtttgcaaatggaaaaaagccgacctaactgtacaacccgtagcaggtagagttacagcaccaccaaacgatttcttcaccgaaatgagaactcccacagaaattcttgaactttttcttgatgacgaggtcattgaactcattgtcaagtactccaacttatatgctgacagtaaaggtgtacatcttggcttgactagctctgaattcaaatgttttctgggaattatttttctgagtggttatgtttcagttcctagaaggcgtatgttttgggaacaaagaacggatgtgcataatgtactggttagtgctgccatgagacgtgaccgatttgaaactatattttctaatttgcatgttgctgacaatgcagatttggatccagtggacaaattttccaaattgcgacctctcataagcaaactcaatgagagatgcatgaaatttgttccaaatgaaacatatttcagctttgatgaattcatggttcattattttggtcgtcatgggtgcaaacagtttattcggggaaagcccattcggtttggctataagttttggtgtggtgccacctgtctgggctacatttgctggtttcagccgtatcagggtaaaaacccaaatactaaacatgaggaatatggtgtcggtgcgtcacttgtccttcagtttagtgaggcacttacagaggcacaccctggacgataccattttgtatccaataactttttcaccagtattgcacttcttgataagctcagttcaatgggacatcaggcaacaggtacagtgagaaaggatcacattgacaaagttccattggaatcagatgtagctttaaagaaaaaagaaagaggcacatttgattatcgaattgatggcaaaggcaatattgtctgcagatggaatgataacagtgttgtcactgttgcctcatctggtgctggtatccatcccctgtgtcttgtcagtcgttattcccagaaattgaaaaagaagatccaagttcagcagccaaacatgatcaaagtgtataaccaattcatgggaggcgtagacagagctgatgaaaacattgataagtatcgggcctcaatccgtggaaagaaatggtattcaagccctcttttgttctgtttcgaattggtcttacaaaatgcttggcaattgcataaaacatatgatgagaaaccagtggattttctggagtttcgtcgacgtgtggtatgccattatctggagacccatggtcatcctccagaacctggccaaaaaggaagacctcagaagcgtaacattgactcccgttatgatggcataaatcatgtgatagtcaaacagggaaagcaaacgcggtgcgctgaatgtcataagaacaccgcttttcgatgtgaaaaatgtgatgttgccttacatgtgaagtgttccgttgaatatcacactgaatagcaggtgtcaccacctcctgagacaagaaacataattttatacattatgtacagtggttttgcctagtgttccaattttggaacgtcacataacaatggaacataataaattttttttatcttcaaaaaaaaaaaaaaaaaa

SEQ ID NO: 16818 - protein, 591 aa, Rattus norvegicus
  SITE 382: note = misc_feature - Xaa can be any naturally occurring amino acid
MSHTDLHGRWFVLCDESVDAVSYACPMRFLLVSESQCPFEGDDPARGGAHSKVRSPKLLKVLSALEEGESGSNREEIFIAPPNNASEDLTDEDSGEEDSDQNSAQLPGWVLRASVLFIVNETNRYARQKNITLDLTVQELKRDRFELIFSYLHFVDNSEPDESDSFAKGTLFTKDRGLDVGASMVVRFVDALQECGCLPCHIFLDKVFTSVKPMSILREKGVKATGTVCEYRTECCPLKDAKELRKMRKGSFDYRVDESQEIIVCRWSNSHVVNICSNAVGIEPARGVGRMDQNIAKYKVKIRGMKRYLSFIGYIIDAALNNAWQLHRVCCQDGHVDLHSFRSYVARVYLESNVDTSSPGRRSRWVETENRFNMIGHWIVHXDKRTQCALCHSQTNTCCEKCQKGVHTFSSYSDITRNTFRWPVRRDRDVGKETFTQAWGGGAGKTQSQLLSKVDDIKQSLDIIHTQRAPESLKIRDPVTRGRDCIEQRGLRMQVLVSHRQHSRVPSRRELEEAVALGLALSLTLMCAQQNEDPSNKIKQQKKTERKHRHVVATSIHILEPGQKAVSSVPETGPMIVSDLPCVATNVQTPR

SEQ ID NO: 16819 - protein, 581 aa, Ciona intestinalis
MAVKGVSADETIWSFLEAESEKDKGDAAYACSSDESDILMDEFNATSSKNVDAPNHCCLSSDDETTVHTSSKLQKLLNDRSKSKRTVQQTHLEELSAEDSMEDWVRIVTDYYPEDHNLRETVMESGMDGVTPLDYLAMFLSAEFWDLLVTETNRHAAQTLRKKKLKKGSNLRTWKDTTVAEMKAYFAILLSMGLCNTVDMQDYWSASWITVTSSISKIMSRVRFTLIRAMLHFCNDEESSSKNSQKHNRLFKVRQLIDVLVPKFSALYKPDKELAIHEMTVACNYKSEQRVRKKPIQWTDKVYALTEARTGYLLEWAIHAGSSRETEKGASIVRKLCTRYIGKHDIYINTANSYTNRNLAKEFVSQTNGSGGIPGELKTINEKNNPVCAKSAVRSSEIKAKSATQKGNKRSYNDMKKANSKKRYNYLSGVIPIFRQLNLFRHKTVKWSLRIFENLAQICVVNSYILYTSKTSDSSDKMDLKKYIEACVSGLLVDYNPHITEKWRPPQPGTVLSRILPPQYVHKIIKIDKKPQCVVCSDSRRKLGRRQTSFMCEKCNVALCVVPCFHRYHTLKNYRVCHLDM

SEQ ID NO: 16820 - protein, 589 aa, synthetic construct
  REGION 1..589: note = Synthetic Sequence
MAKRFYSAEEAAAHCMASSSEEFSGSDSEYVPPASESDSSTEESWCSSSTVSALEEPMEVDEDVDDLEDQEAGDRADAAAGGEPAWGPPCNFPPEIPPFTTVPGVKVDTSNFEPINFFQLFMTEAILQDMVLYTNVYAEQYLTQNPLTRYARAHAWHPTDIAEMKRFVGLTLAMGLIKANSLESYWDTTTVLSIPVFGATMSRNRYQLLLRFLHFNNNATAVPPDQPGHDRLHKLRPLIDSLSERFANVYTPCQNICIDESLLLFKGRLQFRQYIPSKRARYGIKFYKLCESSSGYTSYFLIYEGKDSKLDPPGCPPDLTVSGKIVWELISPLLGQGFHLYVDNFYSSIPLFTALYCLNTPACGTINRNRKGLPRALLDKKLNRGETYALRKNELLAIKFFDKKNVFMLTSIHDESVIREQRVGRPPKNKPLCSKEYSKYMGGVDRTDQLQHYYNATRKTRHWYKKVGIYLIQMALRNSYIVYKAAVPGPKLSYYKYQLQILPALLFGGVEEQTVPEMPPSDNVARLIGKHFIDTLPPTPGKQRPQKGCKVCRKRGIRRDTRYYCPKCPRNPGLCRKPCFEIYHTQLHY

SEQ ID NO: 16821 - DNA, 56 bp, synthetic construct
  misc_feature 1..56: note = Synthetic Sequence
  source 1..56: mol_type = other DNA
taatacgactcactatagctggtacacggcagggtcagttttagagctagaaatag

SEQ ID NO: 16822 - DNA, 37 bp, synthetic construct
  misc_feature 1..37: note = Synthetic Sequence
  source 1..37: mol_type = other DNA
taatacgactcactatagagaatcaaaatcggtgaat

SEQ ID NO: 16823 - DNA, 36 bp, synthetic construct
  misc_feature 1..36: note = Synthetic Sequence
  source 1..36: mol_type = other DNA
taatacgactcactatagtgctagacatgaggtcta

SEQ ID NO: 16824 - DNA, 38 bp, synthetic construct
  misc_feature 1..38: note = Synthetic Sequence
  source 1..38: mol_type = other DNA
taatacgactcactataggctggtacacggcagggtca

SEQ ID NO: 16825 - DNA, 56 bp, synthetic construct
  misc_feature 1..56: note = Synthetic Sequence
  source 1..56: mol_type = other DNA
taatacgactcactatagagaatcaaaatcggtgaatgttttagagctagaaatag

SEQ ID NO: 16826 - DNA, 55 bp, synthetic construct
  misc_feature 1..55: note = Synthetic Sequence
  source 1..55: mol_type = other DNA
taatacgactcactataggatttagagtctctcagcgttttagagctagaaatag

SEQ ID NO: 16827 - DNA, 55 bp, synthetic construct
  misc_feature 1..55: note = Synthetic Sequence
  source 1..55: mol_type = other DNA
taatacgactcactatagtgctagacatgaggtctagttttagagctagaaatag

SEQ ID NO: 16828 - DNA, 56 bp, synthetic construct
  misc_feature 1..56: note = Synthetic Sequence
  source 1..56: mol_type = other DNA
taatacgactcactatagacaccttcttccccagcccgttttagagctagaaatag

SEQ ID NO: 16829 - DNA, 57 bp, synthetic construct
  misc_feature 1..57: note = Synthetic Sequence
  source 1..57: mol_type = other DNA
taatacgactcactatagtggaataatgctgttgttgagttttagagctagaaatag

SEQ ID NO: 16830 - DNA, 57 bp, synthetic construct
  misc_feature 1..57: note = Synthetic Sequence
  source 1..57: mol_type = other DNA
taatacgactcactatagcatcacaggaactttctaaagttttagagctagaaatag

SEQ ID NO: 16831 - DNA, 56 bp, synthetic construct
  misc_feature 1..56: note = Synthetic Sequence
  source 1..56: mol_type = other DNA
taatacgactcactatagtaaaaccaagaggccacaggttttagagctagaaatag

SEQ ID NO: 16832 - DNA, 57 bp, synthetic construct
  misc_feature 1..57: note = Synthetic Sequence
  source 1..57: mol_type = other DNA
taatacgactcactatagacccggccactttcaggagggttttagagctagaaatag

SEQ ID NO: 16833 - DNA, 56 bp, synthetic construct
  misc_feature 1..56: note = Synthetic Sequence
  source 1..56: mol_type = other DNA
taatacgactcactatagattaaacccggccactttcgttttagagctagaaatag

SEQ ID NO: 16834 - DNA, 57 bp, synthetic construct
  misc_feature 1..57: note = Synthetic Sequence
  source 1..57: mol_type = other DNA
taatacgactcactatagagcccaggtaagggcagcttgttttagagctagaaatag

SEQ ID NO: 16835 - DNA, 57 bp, synthetic construct
  misc_feature 1..57: note = Synthetic Sequence
  source 1..57: mol_type = other DNA
taatacgactcactatagagctttgaaacaggtaagacgttttagagctagaaatag

SEQ ID NO: 16836 - DNA, 56 bp, synthetic construct
  misc_feature 1..56: note = Synthetic Sequence
  source 1..56: mol_type = other DNA
taatacgactcactatagctttgaaacaggtaagacagttttagagctagaaatag

SEQ ID NO: 16837 - DNA, 57 bp, synthetic construct
  misc_feature 1..57: note = Synthetic Sequence
  source 1..57: mol_type = other DNA
taatacgactcactatagtttcaaaacctgtcagtgatgttttagagctagaaatag

SEQ ID NO: 16838 - DNA, 57 bp, synthetic construct
  misc_feature 1..57: note = Synthetic Sequence
  source 1..57: mol_type = other DNA
taatacgactcactatagctgcggctgtggtccagctggttttagagctagaaatag

SEQ ID NO: 16839 - DNA, 56 bp, synthetic construct
  misc_feature 1..56: note = Synthetic Sequence
  source 1..56: mol_type = other DNA
taatacgactcactatagctgtggtccagctgaggtggttttagagctagaaatag

SEQ ID NO: 16840 - DNA, 57 bp, synthetic construct
  misc_feature 1..57: note = Synthetic Sequence
  source 1..57: mol_type = other DNA
taatacgactcactatagctgtggtccagctgaggtgagttttagagctagaaatag

SEQ ID NO: 16841 - DNA, 57 bp, synthetic construct
  misc_feature 1..57: note = Synthetic Sequence
  source 1..57: mol_type = other DNA
taatacgactcactatagtgtggtccagctgaggtgaggttttagagctagaaatag

SEQ ID NO: 16842 - DNA, 57 bp, synthetic construct; identical to SEQ ID NO: 16841
  misc_feature 1..57: note = Synthetic Sequence
  source 1..57: mol_type = other DNA

SEQ ID NO: 16843 - DNA, 56 bp, synthetic construct
  misc_feature 1..56: note = Synthetic Sequence
  source 1..56: mol_type = other DNA
taatacgactcactataggctgctccttgaggggctggttttagagctagaaatag

SEQ ID NO: 16844 - DNA, 56 bp, synthetic construct
  misc_feature 1..56: note = Synthetic Sequence
  source 1..56: mol_type = other DNA
taatacgactcactataggcagtatctggagtcattggttttagagctagaaatag

SEQ ID NO: 16845 - DNA, 37 bp, synthetic construct
  misc_feature 1..37: note = Synthetic Sequence
  source 1..37: mol_type = other DNA
taatacgactcactataggcctcggcgctgacgatct

SEQ ID NO: 16846 - DNA, 37 bp, synthetic construct
  misc_feature 1..37: note = Synthetic Sequence
  source 1..37: mol_type = other DNA
taatacgactcactataggctctcggagaatgacgag

SEQ ID NO: 16847 - DNA, 56 bp, synthetic construct
  misc_feature 1..56: note = Synthetic Sequence
  source 1..56: mol_type = other DNA
taatacgactcactataggcctcggcgctgacgatctgttttagagctagaaatag

SEQ ID NO: 16848 - DNA, 56 bp, synthetic construct
  misc_feature 1..56: note = Synthetic Sequence
  source 1..56: mol_type = other DNA
taatacgactcactataggagaatgacgagtggacccgttttagagctagaaatag

SEQ ID NO: 16849 - DNA, 56 bp, synthetic construct
  misc_feature 1..56: note = Synthetic Sequence
  source 1..56: mol_type = other DNA
taatacgactcactataggctctcggagaatgacgaggttttagagctagaaatag

SEQ ID NO: 16850 - DNA, 57 bp, synthetic construct
  misc_feature 1..57: note = Synthetic Sequence
  source 1..57: mol_type = other DNA
taatacgactcactatagcaaacacagcgacctcgggtgttttagagctagaaatag

SEQ ID NO: 16851 - DNA, 57 bp, synthetic construct
  misc_feature 1..57: note = Synthetic Sequence
  source 1..57: mol_type = other DNA
taatacgactcactatagtggctcaaacacagcgacctgttttagagctagaaatag

SEQ ID NO: 16852 - DNA, 57 bp, synthetic construct
  misc_feature 1..57: note = Synthetic Sequence
  source 1..57: mol_type = other DNA
taatacgactcactatagagggcgggctgctccttgaggttttagagctagaaatag

SEQ ID NO: 16853 - DNA, 56 bp, synthetic construct
  misc_feature 1..56: note = Synthetic Sequence
  source 1..56: mol_type = other DNA
taatacgactcactatagtatctggagtcattgaggggttttagagctagaaatag

SEQ ID NO: 16854 - DNA, 57 bp, synthetic construct
  misc_feature 1..57: note = Synthetic Sequence
  source 1..57: mol_type = other DNA
taatacgactcactatagactggacttgacagcggaaggttttagagctagaaatag

SEQ ID NO: 16855 - DNA, 57 bp, synthetic construct
  misc_feature 1..57: note = Synthetic Sequence
  source 1..57: mol_type = other DNA
taatacgactcactatagagagatctcccacacccaaagttttagagctagaaatag

SEQ ID NO: 16856 - DNA, 57 bp, synthetic construct
  misc_feature 1..57: note = Synthetic Sequence
  source 1..57: mol_type = other DNA
taatacgactcactatagccacacccaaaaggccacacgttttagagctagaaatag

SEQ ID NO: 16857 - DNA, 57 bp, synthetic construct
  misc_feature 1..57: note = Synthetic Sequence
  source 1..57: mol_type = other DNA
taatacgactcactatagactgcctgagcagccgcctggttttagagctagaaatag

SEQ ID NO: 16858 - DNA, 57 bp, synthetic construct
  misc_feature 1..57: note = Synthetic Sequence
  source 1..57: mol_type = other DNA
taatacgactcactatagtgagggtctcggccaccttcgttttagagctagaaatag

SEQ ID NO: 16859 - DNA, 57 bp, synthetic construct
  misc_feature 1..57: note = Synthetic Sequence
  source 1..57: mol_type = other DNA
taatacgactcactatagatgacgagtggacccaggatgttttagagctagaaatag

SEQ ID NO: 16860 - DNA, 57 bp, synthetic construct; identical to SEQ ID NO: 16851
  misc_feature 1..57: note = Synthetic Sequence
  source 1..57: mol_type = other DNA

SEQ ID NO: 16861 - DNA, 57 bp, synthetic construct; identical to SEQ ID NO: 16856
  misc_feature 1..57: note = Synthetic Sequence
  source 1..57: mol_type = other DNA

SEQ ID NO: 16862 - DNA, 57 bp, synthetic construct
  misc_feature 1..57: note = Synthetic Sequence
  source 1..57: mol_type = other DNA
taatacgactcactatagagacaggtgacggtccctgcgttttagagctagaaatag

SEQ ID NO: 16863 - DNA, 56 bp, synthetic construct
  misc_feature 1..56: note = Synthetic Sequence
  source 1..56: mol_type = other DNA
taatacgactcactatagcagtgccaggttagagagagttttagagctagaaatag

SEQ ID NO: 16864 - DNA, 56 bp, synthetic construct
  misc_feature 1..56: note = Synthetic Sequence
  source 1..56: mol_type = other DNA
taatacgactcactatagaagttgacttactgaagaagttttagagctagaaatag

SEQ ID NO: 16865 - DNA, 57 bp, synthetic construct
  misc_feature 1..57: note = Synthetic Sequence
  source 1..57: mol_type = other DNA
taatacgactcactatagacccagacacatagcaattcgttttagagctagaaatag

SEQ ID NO: 16866 - DNA, 57 bp, synthetic construct
  misc_feature 1..57: note = Synthetic Sequence
  source 1..57: mol_type = other DNA
taatacgactcactatagtcacgtcatccagcagagaagttttagagctagaaatag

SEQ ID NO: 16867 - DNA, 56 bp, synthetic construct
  misc_feature 1..56: note = Synthetic Sequence
  source 1..56: mol_type = other DNA
taatacgactcactatagatattcctcaggtactccagttttagagctagaaatag

SEQ ID NO: 16868 - DNA, 56 bp, synthetic construct
  misc_feature 1..56: note = Synthetic Sequence
  source 1..56: mol_type = other DNA
taatacgactcactataggccacggagcgagacatctgttttagagctagaaatag

SEQ ID NO: 16869 - DNA, 57 bp, synthetic construct
  misc_feature 1..57: note = Synthetic Sequence
  source 1..57: mol_type = other DNA
taatacgactcactatagactctctctttctggcctgggttttagagctagaaatag

SEQ ID NO: 16870 - DNA, 55 bp, synthetic construct
  misc_feature 1..55: note = Synthetic Sequence
  source 1..55: mol_type = other DNA
taatacgactcactataggagagagaattgaaaaaggttttagagctagaaatag

SEQ ID NO: 16871 - DNA, 20 bp, synthetic construct
  misc_feature 1..20: note = Synthetic Sequence
  source 1..20: mol_type = other DNA
catcgctgttaagaagctcc

SEQ ID NO: 16872 - DNA, 20 bp, synthetic construct
  misc_feature 1..20: note = Synthetic Sequence
  source 1..20: mol_type = other DNA
ggccctccagctgggagtcc

SEQ ID NO: 16873 - DNA, 20 bp, synthetic construct
  misc_feature 1..20: note = Synthetic Sequence
  source 1..20: mol_type = other DNA
gggtctgctgggtctggatg

SEQ ID NO: 16874 - DNA, 20 bp, synthetic construct
  misc_feature 1..20: note = Synthetic Sequence
  source 1..20: mol_type = other DNA
gttctgaggcaggggtctgc

SEQ ID NO: 16875 - DNA, 20 bp, synthetic construct
  misc_feature 1..20: note = Synthetic Sequence
  source 1..20: mol_type = other DNA
cccgccccaacgctgccccc

SEQ ID NO: 16876 - DNA, 20 bp, synthetic construct
  misc_feature 1..20: note = Synthetic Sequence
  source 1..20: mol_type = other DNA
ccttcgcacaggtacctaac

SEQ ID NO: 16877 - DNA, 20 bp, synthetic construct
  misc_feature 1..20: note = Synthetic Sequence
  source 1..20: mol_type = other DNA
gtcttggggctcttagcatc

SEQ ID NO: 16878 - DNA, 20 bp, synthetic construct
  misc_feature 1..20: note = Synthetic Sequence
  source 1..20: mol_type = other DNA
acggccttgctgtggggaag

SEQ ID NO: 16879 - DNA, 20 bp, synthetic construct
  misc_feature 1..20: note = Synthetic Sequence
  source 1..20: mol_type = other DNA
tctgatgatcttgccaaagt

SEQ ID NO: 16880 - DNA, 20 bp, synthetic construct
  misc_feature 1..20: note = Synthetic Sequence
  source 1..20: mol_type = other DNA
ctaccacttctatgaccaga

SEQ ID NO: 16881 - DNA, 20 bp, synthetic construct
  misc_feature 1..20: note = Synthetic Sequence
  source 1..20: mol_type = other DNA
cagtaagtttgtggtgggtg

SEQ ID NO: 16882 - DNA, 20 bp, synthetic construct
  misc_feature 1..20: note = Synthetic Sequence
  source 1..20: mol_type = other DNA
ggaccctgaagaccccggag

SEQ ID NO: 16883 - DNA, 20 bp, synthetic construct
  misc_feature 1..20: note = Synthetic Sequence
  source 1..20: mol_type = other DNA
cccggagaggaggctgcaga

SEQ ID NO: 16884 - DNA, 20 bp, synthetic construct
  misc_feature 1..20: note = Synthetic Sequence
  source 1..20: mol_type = other DNA
ctgtgcgaaggggccgggga

SEQ ID NO: 16885 - DNA, 20 bp, synthetic construct
  misc_feature 1..20: note = Synthetic Sequence
  source 1..20: mol_type = other DNA
agaggaggctggggaggacg

SEQ ID NO: 16886 - DNA, 20 bp, synthetic construct
  misc_feature 1..20: note = Synthetic Sequence
  source 1..20: mol_type = other DNA
cccaggtggtgctgaggctg

SEQ ID NO: 16887 - DNA, 20 bp, synthetic construct
  misc_feature 1..20: note = Synthetic Sequence
  source 1..20: mol_type = other DNA
gggatcctggtaagtgtgtt

SEQ ID NO: 16888 - DNA, 20 bp, synthetic construct
  misc_feature 1..20: note = Synthetic Sequence
  source 1..20: mol_type = other DNA
atcaaagctcgaaggcttgg

SEQ ID NO: 16889 - DNA, 20 bp, synthetic construct
  misc_feature 1..20: note = Synthetic Sequence
  source 1..20: mol_type = other DNA
gcagtgccaggttagagaga

SEQ ID NO: 16890 - DNA, 20 bp, synthetic construct
  misc_feature 1..20: note = Synthetic Sequence
  source 1..20: mol_type = other DNA
caagccagcgacgcagtgcc

SEQ ID NO: 16891 - DNA, 20 bp, synthetic construct
  misc_feature 1..20: note = Synthetic Sequence
  source 1..20: mol_type = other DNA
ccaatcaggacaaggcccgc

SEQ ID NO: 16892 - DNA, 20 bp, synthetic construct
  misc_feature 1..20: note = Synthetic Sequence
  source 1..20: mol_type = other DNA
acccagacacatagcaattc

SEQ ID NO: 16893 - DNA, 20 bp, synthetic construct
  misc_feature 1..20: note = Synthetic Sequence
  source 1..20: mol_type = other DNA
gatattcctcaggtactcca

SEQ ID NO: 16894 - DNA, 20 bp, synthetic construct
  misc_feature 1..20: note = Synthetic Sequence
  source 1..20: mol_type = other DNA
ggccacggagcgagacatct

SEQ ID NO: 16895 - DNA, 20 bp, synthetic construct
  misc_feature 1..20: note = Synthetic Sequence
  source 1..20: mol_type = other DNA
catcgctgttaagaagctcc

SEQ ID NO: 16896 - DNA, 20 bp, synthetic construct
  misc_feature 1..20: note = Synthetic Sequence
  source 1..20: mol_type = other DNA
ggtccatctggtcatagaag

SEQ ID NO: 16897 - DNA, 20 bp, synthetic construct
  misc_feature 1..20: note = Synthetic Sequence
  source 1..20: mol_type = other DNA
ggccctccagctgggagtcc

SEQ ID NO: 16898 - DNA, 20 bp, synthetic construct
  misc_feature 1..20: note = Synthetic Sequence
  source 1..20: mol_type = other DNA
ccttgctcaggccctccagc

SEQ ID NO: 16899 - DNA, 20 bp, synthetic construct
  misc_feature 1..20: note = Synthetic Sequence
  source 1..20: mol_type = other DNA
gggtctgctgggtctggatg

SEQ ID NO: 16900 - DNA, 20 bp, synthetic construct
  misc_feature 1..20: note = Synthetic Sequence
  source 1..20: mol_type = other DNA
gttctgaggcaggggtctgc

SEQ ID NO: 16901 - DNA, 20 bp, synthetic construct
  misc_feature 1..20: note = Synthetic Sequence
  source 1..20: mol_type = other DNA
tgagagtggtggagtgcttc

SEQ ID NO: 16902 - DNA, 20 bp, synthetic construct
  misc_feature 1..20: note = Synthetic Sequence
  source 1..20: mol_type = other DNA
ctcgttccctcgctgccggt

SEQ ID NO: 16903 - DNA, 20 bp, synthetic construct
  misc_feature 1..20: note = Synthetic Sequence
  source 1..20: mol_type = other DNA
cccgccccaacgctgccccc

SEQ ID NO: 16904 - DNA, 20 bp, synthetic construct
  misc_feature 1..20: note = Synthetic Sequence
  source 1..20: mol_type = other DNA
ccttcgcacaggtacctaac

SEQ ID NO: 16905 - DNA, 20 bp, synthetic construct
  misc_feature 1..20: note = Synthetic Sequence
  source 1..20: mol_type = other DNA
cagccggggctagggccgcg

SEQ ID NO: 16906 - DNA, 20 bp, synthetic construct
  misc_feature 1..20: note = Synthetic Sequence
  source 1..20: mol_type = other DNA
gccgcggccgccaccgaggc

SEQ ID NO: 16907 - DNA, 20 bp, synthetic construct
  misc_feature 1..20: note = Synthetic Sequence
  source 1..20: mol_type = other DNA
gccgcgctctcgcctccccc

SEQ ID NO: 16908 - DNA, 20 bp, synthetic construct
  misc_feature 1..20: note = Synthetic Sequence
  source 1..20: mol_type = other DNA
gtcttggggctcttagcatc

SEQ ID NO: 16909 - DNA, 20 bp, synthetic construct
  misc_feature 1..20: note = Synthetic Sequence
  source 1..20: mol_type = other DNA
acggccttgctgtggggaag

SEQ ID NO: 16910 - DNA, 20 bp, synthetic construct
  misc_feature 1..20: note = Synthetic Sequence
  source 1..20: mol_type = other DNA
tctgatgatcttgccaaagt

SEQ ID NO: 16911 - DNA, 20 bp, synthetic construct
  misc_feature 1..20: note = Synthetic Sequence
  source 1..20: mol_type = other DNA
gtcttggggctcttagcatc

SEQ ID NO: 16912 - DNA, 20 bp, synthetic construct
  misc_feature 1..20: note = Synthetic Sequence
  source 1..20: mol_type = other DNA
aggctcatcttctgccatcc

SEQ ID NO: 16913 - DNA, 20 bp, synthetic construct
  misc_feature 1..20: note = Synthetic Sequence
  source 1..20: mol_type = other DNA
agacaggtgacggtccctgc

SEQ ID NO: 16914 - DNA, 20 bp, synthetic construct
  misc_feature 1..20: note = Synthetic Sequence
  source 1..20: mol_type = other DNA
cctgcgggccttgtcctgat

SEQ ID NO: 16915 - DNA, 20 bp, synthetic construct
  misc_feature 1..20: note = Synthetic Sequence
  source 1..20: mol_type = other DNA
tataagtggaggcgtcgcgc

SEQ ID NO: 16916 - DNA, 20 bp, synthetic construct
  misc_feature 1..20: note = Synthetic Sequence
  source 1..20: mol_type = other DNA
gaagttgacttactgaagaa

SEQ ID NO: 16917 - DNA, 20 bp, synthetic construct
  misc_feature 1..20: note = Synthetic Sequence
  source 1..20: mol_type = other DNA
tcacgtcatccagcagagaa

SEQ ID NO: 16918 - DNA, 20 bp, synthetic construct
  misc_feature 1..20: note = Synthetic Sequence
  source 1..20: mol_type = other DNA
actctctctttctggcctgg

SEQ ID NO: 16919 - DNA, 20 bp, synthetic construct
  misc_feature 1..20: note = Synthetic Sequence
  source 1..20: mol_type = other DNA
ctaccacttctatgaccaga

SEQ ID NO: 16920 - DNA, 20 bp, synthetic construct
  misc_feature 1..20: note = Synthetic Sequence
  source 1..20: mol_type = other DNA
agattgagctctactcaggt

SEQ ID NO: 16921 - DNA, 20 bp, synthetic construct
  misc_feature 1..20: note = Synthetic Sequence
  source 1..20: mol_type = other DNA
cagtaagtttgtggtgggtg

SEQ ID NO: 16922 - DNA, 20 bp, synthetic construct
  misc_feature 1..20: note = Synthetic Sequence
  source 1..20: mol_type = other DNA
tgtggtgggtggggaggtct

SEQ ID NO: 16923 - DNA, 20 bp, synthetic construct
  misc_feature 1..20: note = Synthetic Sequence
  source 1..20: mol_type = other DNA
ggaccctgaagaccccggag

SEQ ID NO: 16924 - DNA, 20 bp, synthetic construct
  misc_feature 1..20: note = Synthetic Sequence
  source 1..20: mol_type = other DNA
cccggagaggaggctgcaga

SEQ ID NO: 16925 - DNA, 20 bp, synthetic construct
  misc_feature 1..20: note = Synthetic Sequence
  source 1..20: mol_type = other DNA
gaacgaggtgtcagctctgc

SEQ ID NO: 16926 - DNA, 20 bp, synthetic construct
  misc_feature 1..20: note = Synthetic Sequence
  source 1..20: mol_type = other DNA
ggccaccctagactgtgagt

SEQ ID NO: 16927 - DNA, 20 bp, synthetic construct
  misc_feature 1..20: note = Synthetic Sequence
  source 1..20: mol_type = other DNA
ctgtgcgaaggggccgggga

SEQ ID NO: 16928 - DNA, 20 bp, synthetic construct
  misc_feature 1..20: note = Synthetic Sequence
  source 1..20: mol_type = other DNA
agaggaggctggggaggacg

SEQ ID NO: 16929 - DNA, 20 bp, synthetic construct
  misc_feature 1..20: note = Synthetic Sequence
  source 1..20: mol_type = other DNA
cttggcgccagcctcggtgg

SEQ ID NO: 16930 - DNA, 20 bp, synthetic construct
  misc_feature 1..20: note = Synthetic Sequence
  source 1..20: mol_type = other DNA
ctagtgatgcaaccctgtgc

SEQ ID NO: 16931 - DNA, 20 bp, synthetic construct
  misc_feature 1..20: note = Synthetic Sequence
  source 1..20: mol_type = other DNA
gaggacgaggagactcactc

SEQ ID NO: 16932 - DNA, 20 bp, synthetic construct
  misc_feature 1..20: note = Synthetic Sequence
  source 1..20: mol_type = other DNA
cccaggtggtgctgaggctg

SEQ ID NO: 16933 - DNA, 20 bp, synthetic construct
  misc_feature 1..20: note = Synthetic Sequence
  source 1..20: mol_type = other DNA
gggatcctggtaagtgtgtt

SEQ ID NO: 16934 - DNA, 20 bp, synthetic construct
  misc_feature 1..20: note = Synthetic Sequence
  source 1..20: mol_type = other DNA
atcaaagctcgaaggcttgg

SEQ ID NO: 16935 - DNA, 20 bp, synthetic construct
  misc_feature 1..20: note = Synthetic Sequence
  source 1..20: mol_type = other DNA
ccccaggtggtgctgaggct

SEQ ID NO: 16936 - DNA, 20 bp, synthetic construct
  misc_feature 1..20: note = Synthetic Sequence
  source 1..20: mol_type = other DNA
actgggggaagggccccccc

SEQ ID NO: 16937 - DNA, 19 bp, synthetic construct
  misc_feature 1..19: note = Synthetic Sequence
  source 1..19: mol_type = other DNA
ggagagagaattgaaaaag

SEQ ID NO: 16938 - DNA, 19 bp, synthetic construct
  misc_feature 1..19: note = Synthetic Sequence
  source 1..19: mol_type = other DNA
gggccttgtcctgattggc

SEQ ID NO: 16939 - DNA, 18 bp, synthetic construct
  misc_feature 1..18: note = Synthetic Sequence
  source 1..18: mol_type = other DNA
ggcactgcgtcgctggct

SEQ ID NO: 16940 - DNA, 20 bp, synthetic construct
  misc_feature 1..20: note = Synthetic Sequence
  source 1..20: mol_type = other DNA
ggtccatctggtcatagaag

SEQ ID NO: 16941 - DNA, 19 bp, synthetic construct
  misc_feature 1..19: note = Synthetic Sequence
  source 1..19: mol_type = other DNA
ggagtcctggaagacatac

SEQ ID NO: 16942 - DNA, 19 bp, synthetic construct
  misc_feature 1..19: note = Synthetic Sequence
  source 1..19: mol_type = other DNA
ggtccccaagttctgaggc

SEQ ID NO: 16943 - DNA, 19 bp, synthetic construct
  misc_feature 1..19: note = Synthetic Sequence
  source 1..19: mol_type = other DNA
ggcaggggtctgctgggtc

SEQ ID NO: 16944 - DNA, 19 bp, synthetic construct
  misc_feature 1..19: note = Synthetic Sequence
  source 1..19: mol_type = other DNA
ggcccccgggggcagcgtt

SEQ ID NO: 16945 - DNA, 19 bp, synthetic construct
  misc_feature 1..19: note = Synthetic Sequence
  source 1..19: mol_type = other DNA
ggtacctgtgcgaaggggc

SEQ ID NO: 16946 - DNA, 18 bp, synthetic construct
  misc_feature 1..18: note = Synthetic Sequence
  source 1..18: mol_type = other DNA
gggaagggcccccccagg

SEQ ID NO: 16947 - DNA, 19 bp, synthetic construct
  misc_feature 1..19: note = Synthetic Sequence
  source 1..19: mol_type = other DNA
gccttcgagctttgatgtc

SEQ ID NO: 16948-16971 - skipped (24 entries)

SEQ ID NO: 16972 - protein, 500 aa, synthetic construct
  REGION 1..500: note = Synthetic Sequence
MSRSVALAVLALLSLSGLEAVMAPRTLILGGGGSGGGGSGGGGSIQRTPKIQVYSRHPAENGKSNFLNCYVSGFHPSDIEVDLLKNGERIEKVEHSDLSFSKDWSFYLLYYTEFTPTEKDEYACRVNHVTLSQPKIVKWDRDMGGGGSGGGGSGGGGSGGGGSGSHSLKYFHTSVSRPGRGEPRFISVGYVDDTQFVRFDNDAASPRMVPRAPWMEQEGSEYWDRETRSARDTAQIFRVNLRTLRGYYNQSEAGSHTLQWMHGCELGPDGRFLRGYEQFAYDGKDYLTLNEDLRSWTAVDTAAQISEQKSNDASEAEHQRAYLEDTCVEWLHKYLEKGKETLLHLEPPKTHVTHHPISDHEATLRCWALGFYPAEITLTWQQDGEGHTQDTELVETRPAGDGTFQKWAAVVVPSGEEQRYTCHVQHEGLPEPVTLRWKPASQPTIPIVGIIAGLVLLGSVVSGAVVAAVIWRKKSSGGKGGSYSKAEWSDSAQGSESHSL

SEQ ID NO: 16973 - DNA, 1503 bp, synthetic construct
  misc_feature 1..1503: note = Synthetic Sequence
  source 1..1503: mol_type = other DNA
atgtctcgcagcgtggccctggccgtgctggccctgctgtccctgtctggcctggaggccgtgatggccccccggaccctgatcctgggaggaggaggcagcggcggaggaggctccggaggcggcggctctatccagcgcacacctaagatccaggtgtattctcggcacccagccgagaacggcaagagcaacttcctgaattgctacgtgagcggctttcacccttccgacatcgaggtggatctgctgaagaatggcgagagaatcgagaaggtggagcactccgacctgagcttctccaaggattggtctttttatctgctgtactataccgagtttacccctacagagaaggacgagtacgcctgtcgcgtgaaccacgtgacactgtcccagccaaagatcgtgaagtgggaccgggatatgggcggcggcggctctggcggcggcggcagcggcggcggcggctccggaggaggcggctctggcagccactccctgaagtatttccacacctctgtgagccggccaggcagaggagagccacggttcatctctgtgggctacgtggacgatacacagttcgtgaggtttgacaatgatgccgccagcccaagaatggtgcctagggccccatggatggagcaggagggcagcgagtattgggacagggagacccggagcgccagagacacagcacagattttccgggtgaacctgagaaccctgaggggctactataatcagtccgaggccggctctcacacactccagtggatgcacggatgcgagctgggaccagatggccgcttcctgcggggctacgagcagtttgcctatgacggcaaggattacctgaccctgaacgaggacctgagatcctggaccgccgtggatacagccgcccagatcagcgagcagaagtccaatgacgcatctgaggcagagcaccagagggcatatctggaggatacctgcgtggagtggctgcacaagtacctggagaagggcaaggagacactgctgcacctggagccccctaagacccacgtgacacaccacccaatcagcgaccacgaggccaccctgaggtgttgggcactgggcttctatcccgccgagatcaccctgacatggcagcaggacggagagggacacacccaggatacagagctggtggagaccaggcccgccggcgatggcacatttcagaagtgggccgccgtggtggtgccttccggagaggagcagagatacacctgtcacgtgcagcacgagggactgccagagccagtgaccctgaggtggaagcctgccagccagcccacaatccctatcgtgggaatcatcgcaggcctggtgctgctgggctctgtggtgagcggagcagtggtggccgccgtgatctggcggaagaagagcagcggaggcaagggaggctcctactccaaggcagagtggagcgactccgcccagggctctgagagccactccctgtga

SEQ ID NO: 16974 - protein, 500 aa, synthetic construct
  REGION 1..500: note = Synthetic Sequence
MSRSVALAVLALLSLSGLEAVMAPRTLILGGGGSGGGGSGGGGSIQRTPKIQVYSRHPAENGKSNFLNCYVSGFHPSDIEVDLLKNGERIEKVEHSDLSFSKDWSFYLLYYTEFTPTEKDEYACRVNHVTLSQPKIVKWDRDMGGGGSGGGGSGGGGSGGGGSGSHSLKYFHTSVSRPGRGEPRFISVGYVDDTQFVRFDNDAASPRMVPRAPWMEQEGSEYWDRETRSARDTAQIFRVNLRTLRGYYNQSEAGSHTLQWMHGCELGPDRRFLRGYEQFAYDGKDYLTLNEDLRSWTAVDTAAQISEQKSNDASEAEHQRAYLEDTCVEWLHKYLEKGKETLLHLEPPKTHVTHHPISDHEATLRCWALGFYPAEITLTWQQDGEGHTQDTELVETRPAGDGTFQKWAAVVVPSGEEQRYTCHVQHEGLPEPVTLRWKPASQPTIPIVGIIAGLVLLGSVVSGAVVAAVIWRKKSSGGKGGSYSKAEWSDSAQGSESHSL

SEQ ID NO: 16975 - DNA, 1503 bp, synthetic construct
  misc_feature 1..1503: note = Synthetic Sequence
  source 1..1503: mol_type = other DNA
atgtctcgcagcgtggccctggccgtgctggccctgctgtccctgtctggcctggaggccgtgatggccccccggaccctgatcctgggaggaggaggcagcggcggaggaggctccggaggcggcggctctatccagcgcacacctaagatccaggtgtattctcggcacccagccgagaacggcaagagcaacttcctgaattgctacgtgagcggctttcacccttccgacatcgaggtggatctgctgaagaatggcgagagaatcgagaaggtggagcactccgacctgagcttctccaaggattggtctttttatctgctgtactataccgagtttacccctacagagaaggacgagtacgcctgtcgcgtgaaccacgtgacactgtcccagccaaagatcgtgaagtgggaccgggatatgggcggcggcggctctggcggcggcggcagcggcggcggcggctccggaggaggcggctctggcagccactccctgaagtatttccacacctctgtgagccggccaggcagaggagagccacggttcatctctgtgggctacgtggacgatacacagttcgtgaggtttgacaatgatgccgccagcccaagaatggtgcctagggccccatggatggagcaggagggcagcgagtattgggacagggagacccggagcgccagagacacagcacagattttccgggtgaacctgagaaccctgaggggctactataatcagtccgaggccggctctcacacactccagtggatgcacggatgcgagctgggaccagatcgccgcttcctgcggggctacgagcagtttgcctatgacggcaaggattacctgaccctgaacgaggacctgagatcctggaccgccgtggatacagccgcccagatcagcgagcagaagtccaatgacgcatctgaggcagagcaccagagggcatatctggaggatacctgcgtggagtggctgcacaagtacctggagaagggcaaggagacactgctgcacctggagccccctaagacccacgtgacacaccacccaatcagcgaccacgaggccaccctgaggtgttgggcactgggcttctatcccgccgagatcaccctgacatggcagcaggacggagagggacacacccaggatacagagctggtggagaccaggcccgccggcgatggcacatttcagaagtgggccgccgtggtggtgccttccggagaggagcagagatacacctgtcacgtgcagcacgagggactgccagagccagtgaccctgaggtggaagcctgccagccagcccacaatccctatcgtgggaatcatcgcaggcctggtgctgctgggctctgtggtgagcggagcagtggtggccgccgtgatctggcggaagaagagcagcggaggcaagggaggctcctactccaaggcagagtggagcgactccgcccagggctctgagagccactccctgtga

SEQ ID NO: 16976 - protein, 476 aa, synthetic construct
  REGION 1..476: note = Synthetic Sequence
MSRSVALAVLALLSLSGLEAIQRTPKIQVYSRHPAENGKSNFLNCYVSGFHPSDIEVDLLKNGERIEKVEHSDLSFSKDWSFYLLYYTEFTPTEKDEYACRVNHVTLSQPKIVKWDRDMGGGGSGGGGSGGGGSGGGGSGSHSLKYFHTSVSRPGRGEPRFISVGYVDDTQFVRFDNDAASPRMVPRAPWMEQEGSEYWDRETRSARDTAQIFRVNLRTLRGYYNQSEAGSHTLQWMHGCELGPDRRFLRGYEQFAYDGKDYLTLNEDLRSWTAVDTAAQISEQKSNDASEAEHQRAYLEDTCVEWLHKYLEKGKETLLHLEPPKTHVTHHPISDHEATLRCWALGFYPAEITLTWQQDGEGHTQDTELVETRPAGDGTFQKWAAVVVPSGEEQRYTCHVQHEGLPEPVTLRWKPASQPTIPIVGIIAGLVLLGSVVSGAVVAAVIWRKKSSGGKGGSYSKAEWSDSAQGSESHSL

SEQ ID NO: 16977 - DNA, 1435 bp, synthetic construct
  misc_feature 1..1435: note = Synthetic Sequence
  source 1..1435: mol_type = other DNA
atgagcagatctgtggccctggctgttctggctctgctgtctctgtctggcctggaagccatccagcggacccctaagatccaggtgtacagcagacaccccgccgagaacggcaagagcaacttcctgaactgctacgtgtccggctttcaccccagcgacattgaggtggacctgctgaagaacggcgagcggatcgagaaggtggaacacagcgatctgagcttcagcaaggactggtccttctacctgctgtactacaccgagttcacccctaccgagaaggacgagtacgcctgcagagtgaaccacgtgacactgagccagcctaagatcgtgaagtgggacagagatatgggcggaggcggatctggtggcggaggaagtggcggcggaggatctggcggtggtggttctggatctcacagcctgaagtactttcacacctccgtgtccagacctggcagaggcgagcctagattcatcagcgtgggctacgtggacgacacccagttcgtcagattcgacaacgacgccgcctctcctcggatggttcctagagcaccctggatggaacaagagggcagcgagtactgggatcgcgagacaagaagcgccagagacacagcccagatcttccgcgtgaacctgagaaccctgcggggctactacaatcagtctgaggccggctctcacaccctgcagtggatgcatggatgtgaactgggccccgacagacggttcctgagaggctatgagcagttcgcctacgacggcaaggactacctgacactgaacgaggacctgagaagctggaccgccgtggatacagccgctcagatcagcgagcagaagtctaacgacgccagcgaggccgaacaccagagagcctatctggaagatacctgcgtggaatggctgcacaagtacctggaaaagggcaaagagacactgctgcacctggaacctccaaagacacatgtgacccaccatcctatcagcgaccacgaggccacactgagatgttgggccctgggcttttaccctgccgagatcacactgacatggcagcaggatggcgagggccacacacaggatacagagctggtggaaacaagacctgccggcgacggcaccttccagaaatgggctgctgtggttgtgcccagcggcgaggaacagagatacacctgtcacgtgcagcacgagggactgcctgaacctgtgactctgagatggaagcctgccagccagccaacaatccccatcgtgggaatcattgccggcctggtgctgctgggatctgtggtttctggtgctgtggtggccgccgtgatttggagaaagaagtcctctggcggcaaaggcggctcctactctaaggccgagtggagcgattctgcccagggctctgaaagccacagcctgtagataa

SEQ ID NO: 16978 - protein, 419 aa, synthetic construct
  REGION 1..419: note = Synthetic Sequence
DLLKNGERIEKVEHSDLSFSKDWSFYLLYYTEFTPTEKDEYACRVNHVTLSQPKIVKWDRDMGGGGSGGGGSGGGGSGGGGSGSHSLKYFHTSVSRPGRGEPRFISVGYVDDTQFVRFDNDAASPRMVPRAPWMEQEGSEYWDRETRSARDTAQIFRVNLRTLRGYYNQSEAGSHTLQWMHGCELGPDGRFLRGYEQFAYDGKDYLTLNEDLRSWTAVDTAAQISEQKSNDASEAEHQRAYLEDTCVEWLHKYLEKGKETLLHLEPPKTHVTHHPISDHEATLRCWALGFYPAEITLTWQQDGEGHTQDTELVETRPAGDGTFQKWAAVVVPSGEEQRYTCHVQHEGLPEPVTLRWKPASQPTIPIVGIIAGLVLLGSVVSGAVVAAVIWRKKSSGGKGGSYSKAEWSDSAQGSESHSL

SEQ ID NO: 16979 - DNA, 1435 bp, synthetic construct
  misc_feature 1..1435: note = Synthetic Sequence
  source 1..1435: mol_type = other DNA
atgagcagatctgtggccctggctgttctggctctgctgtctctgtctggcctggaagccatccagcggacccctaagatccaggtgtacagcagacaccccgccgagaacggcaagagcaacttcctgaactgctacgtgtccggctttcaccccagcgacattgaggtggacctgctgaagaacggcgagcggatcgagaaggtggaacacagcgatctgagcttcagcaaggactggtccttctacctgctgtactacaccgagttcacccctaccgagaaggacgagtacgcctgcagagtgaaccacgtgacactgagccagcctaagatcgtgaagtgggacagagatatgggcggaggcggatctggtggcggaggaagtggcggcggaggatctggcggtggtggttctggatctcacagcctgaagtactttcacacctccgtgtccagacctggcagaggcgagcctagattcatcagcgtgggctacgtggacgacacccagttcgtcagattcgacaacgacgccgcctctcctcggatggttcctagagcaccctggatggaacaagagggcagcgagtactgggatcgcgagacaagaagcgccagagacacagcccagatcttccgcgtgaacctgagaaccctgcggggctactacaatcagtctgaggccggctctcacaccctgcagtggatgcatggatgtgaactgggccccgacagacagttcctgagaggctatgagcagttcgcctacgacggcaaggactacctgacactgaacgaggacctgagaagctggaccgccgtggatacagccgctcagatcagcgagcagaagtctaacgacgccagcgaggccgaacaccagagagcctatctggaagatacctgcgtggaatggctgcacaagtacctggaaaagggcaaagagacactgctgcacctggaacctccaaagacacatgtgacccaccatcctatcagcgaccacgaggccacactgagatgttgggccctgggcttttaccctgccgagatcacactgacatggcagcaggatggcgagggccacacacaggatacagagctggtggaaacaagacctgccggcgacggcaccttccagaaatgggctgctgtggttgtgcccagcggcgaggaacagagatacacctgtcacgtgcagcacgagggactgcctgaacctgtgactctgagatggaagcctgccagccagccaacaatccccatcgtgggaatcattgccggcctggtgctgctgggatctgtggtttctggtgctgtggtggccgccgtgatttggagaaagaagtcctctggcggcaaaggcggctcctactctaaggccgagtggagcgattctgcccagggctctgaaagccacagcctgtagataa

SEQ ID NO: 16980 - protein, 357 aa, synthetic construct
  REGION 1..357: note = Synthetic Sequence
MSRSVALAVLALLSLSGLEAGSHSLKYFHTSVSRPGRGEPRFISVGYVDDTQFVRFDNDAASPRMVPRAPWMEQEGSEYWDRETRSARDTAQIFRVNLRTLRGYYNQSEAGSHTLQWMHGCELGPDRRFLRGYEQFAYDGKDYLTLNEDLRSWTAVDTAAQISEQKSNDASEAEHQRAYLEDTCVEWLHKYLEKGKETLLHLEPPKTHVTHHPISDHEATLRCWALGFYPAEITLTWQQDGEGHTQDTELVETRPAGDGTFQKWAAVVVPSGEEQRYTCHVQHEGLPEPVTLRWKPASQPTIPIVGIIAGLVLLGSVVSGAVVAAVIWRKKSSGGKGGSYSKAEWSDSAQGSESHSL

SEQ ID NO: 16981 - DNA, 1078 bp, synthetic construct
  misc_feature 1..1078: note = Synthetic Sequence
  source 1..1078: mol_type = other DNA
atgagcagatctgtggccctggctgttctggctctgctgtctctgtctggactggaagccggcagccacagcctgaagtactttcacaccagcgtgtccagacctggcagaggcgagcctagattcatcagcgtgggctacgtggacgacacccagttcgtcagattcgacaacgacgccgcctctcctcggatggttcctagagcaccctggatggaacaagagggcagcgagtactgggacagagagacaagaagcgccagagacacagcccagatcttcagagtgaacctgcggaccctgcggggctactacaatcagtctgaagccggctctcacaccctgcagtggatgcacggatgtgaactgggccccgacagaagattcctgagaggctacgagcagttcgcctacgacggcaaggactacctgacactgaacgaggacctgagaagctggaccgccgtggatacagccgctcagatcagcgagcagaagtctaacgacgcctctgaggccgaacaccagagagcctacctggaagatacctgcgtggaatggctgcacaagtacctggaaaagggcaaagagacactgctgcacctggaacctccaaagacacacgtgacccaccatcctatcagcgaccacgaggccacactgagatgttgggccctgggcttttaccccgccgagatcacactgacatggcagcaggatggcgagggccacacacaggatacagagctggtggaaacaagacctgccggcgacggcaccttccagaaatgggctgctgtggtggttcccagcggcgaggaacagagatacacctgtcacgtgcagcacgagggactgcctgaacctgtgacactgaggtggaagcctgccagccagcctacaatccccatcgtgggaatcattgccggcctggtgctgctgggatctgtggtttctggtgcagtggtggccgccgtgatctggcggaaaaaaagctcaggcggcaaaggcggctcctactccaaagccgagtggagcgattctgcccagggctctgaaagccactctctgtagataa

SEQ ID NO: 16982 - protein, 357 aa, synthetic construct
  REGION 1..357: note = Synthetic Sequence
MSRSVALAVLALLSLSGLEAGSHSLKYFHTSVSRPGRGEPRFISVGYVDDTQFVRFDNDAASPRMVPRAPWMEQEGSEYWDRETRSARDTAQIFRVNLRTLRGYYNQSEAGSHTLQWMHGCELGPDGRFLRGYEQFAYDGKDYLTLNEDLRSWTAVDTAAQISEQKSNDASEAEHQRAYLEDTCVEWLHKYLEKGKETLLHLEPPKTHVTHHPISDHEATLRCWALGFYPAEITLTWQQDGEGHTQDTELVETRPAGDGTFQKWAAVVVPSGEEQRYTCHVQHEGLPEPVTLRWKPASQPTIPIVGIIAGLVLLGSVVSGAVVAAVIWRKKSSGGKGGSYSKAEWSDSAQGSESHSL

SEQ ID NO: 16983 - DNA, 1078 bp, synthetic construct
  misc_feature 1..1078: note = Synthetic Sequence
  source 1..1078: mol_type = other DNA
atgagcagatctgtggccctggctgttctggctctgctgtctctgtctggactggaagccggcagccacagcctgaagtactttcacaccagcgtgtccagacctggcagaggcgagcctagattcatcagcgtgggctacgtggacgacacccagttcgtcagattcgacaacgacgccgcctctcctcggatggttcctagagcaccctggatggaacaagagggcagcgagtactgggacagagagacaagaagcgccagagacacagcccagatcttcagagtgaacctgcggaccctgcggggctactacaatcagtctgaagccggctctcacaccctgcagtggatgcacggatgtgaactgggccccgacggaagattcctgagaggctacgagcagttcgcctacgacggcaaggactacctgacactgaacgaggacctgagaagctggaccgccgtggatacagccgctcagatcagcgagcagaagtctaacgacgcctctgaggccgaacaccagagagcctacctggaagatacctgcgtggaatggctgcacaagtacctggaaaagggcaaagagacactgctgcacctggaacctccaaagacacacgtgacccaccatcctatcagcgaccacgaggccacactgagatgttgggccctgggcttttaccccgccgagatcacactgacatggcagcaggatggcgagggccacacacaggatacagagctggtggaaacaagacctgccggcgacggcaccttccagaaatgggctgctgtggtggttcccagcggcgaggaacagagatacacctgtcacgtgcagcacgagggactgcctgaacctgtgacactgaggtggaagcctgccagccagcctacaatccccatcgtgggaatcattgccggcctggtgctgctgggatctgtggtttctggtgcagtggtggccgccgtgatctggcggaaaaaaagctcaggcggcaaaggcggctcctactccaaagccgagtggagcgattctgcccagggctctgaaagccactctctgtagataa

SEQ ID NO: 16984-17005 - skipped (22 entries)

SEQ ID NO: 17006 - DNA, 5296 bp, synthetic construct
  misc_feature 1..5296: note = Synthetic Sequence
  source 1..5296: mol_type = other DNA
tcctatataataaaagagaaacatgcaaattgaccatccctccgctacgctcaagccacgcccaccagccaatcagaagtgactatgcaaattaacccaacaaagatggcagttaaatttgcatacgcaggtgtcaagcgccccaggaggcaacggcggccgcgggctcccaggaccttcgctggccccgggaggcgaggccggccgcgcctagccacacccgcgggctcccgggaccttcgccagcagagagcagagcgggagagcgggcggagagcgggaggtttggaggacttggcagagcaggaggccgctggacatagagcagagcgagagagagggtggcttggagggcgtggctccctctgtcaccccagcttcctcatcacagctgtggaaactgacagcagggaggaggaagtcccacccccacagaatcagccagaatcagccgttggtcagacagctctcagcggcctgacagccaggactctcattcacctgcatctcagaccgtgacagtagagaggtgggactatgtctaaagaacaactgttgatacaacgtagctctgcagccgaaagatgccggcgttatcgacagaaaatgtctgcagagcaacgtgcgtctgatcttgaaagaaggcggcgcctgcaacagaatgtatctgaagagcagctactggaaaaacgtcgctctgaagccgaaaaacagcggcgtcatcgacagaaaatgtctaaagaccaacgtgcctttgaagttgaaagaaggcggtggcgacgacagaatatgtctagagaacagtcatcaacaagtactaccaataccggtaggaactgccttctcagcaaaaatggagtacatgaggatgcaattctcgaacatagttgtggtggaatgactgttcgatgtgaattttgcctatcactaaatttctctgatgaaaaaccatccgatgggaaatttactcgatgttgtagcaaagggaaagtctgtccaaatgatatacattttccagattacccggcatatttaaaaagattaatgacaaacgaagattctgacagtaaaaatttcatggaaaatattcgttccataaatagttcttttgcttttgcttccatgggtgcaaatattgcatcgccatcaggatatgggccatactgttttagaatacacggacaagtttatcaccgtactggaactttacatccttcggatggtgtttctcggaagtttgctcaactctatattttggatacagccgaagctacaagtaaaagattagcaatgccagaaaaccagggctgctcagaaagactcatgatcaacatcaacaacctcatgcatgaaataaatgaattaacaaaatcgtacaagatgctacatgaggtagaaaaggaagcccaatctgaagcagcagcaaaaggtattgctcccacagaagtaacaatggcgattaaatacgatcgtaacagtgacccaggtagatataattctccccgtgtaaccgaggttgctgtcatattcagaaacgaagatggagaacctccttttgaaagggacttgctcattcattgtaaaccagatcccaataatccaaatgccactaaaatgaaacaaatcagtatcctgtttcctacattagatgcaatgacatatcctattctttttccacatggtgaaaaaggctggggaacagatattgcattaagactcagagacaacagtgtaatcgacaataatactagacaaaatgtaaggacacgagtcacacaaatgcagtattatggatttcatctctctgtgcgggacacgttcaatcctattttaaatgcaggaaaattaactcaacagtttattgtggattcatattcaaaaatggaggccaatcggataaatttcatcaaagcaaaccaatctaagttgagagttgaaaaatatagtggtttgatggattatctcaaatctagatctgaaaatgacaatgtgccgattggtaaaatgataatacttccatcatcttttgagggtagtcccagaaatatgcagcagcgatatcaggatgctatggcaattgtaacgaagtatggcaagcccgatttattcataaccatgacatgcaaccccaaatgggcagatattacaaacaatttacaacgctggcaaaaagttgaaaacagacctgacttggtagccagagtttttaatattaagctgaatgctcttttaaatgatatatgtaaattccatttatttggcaaagtaatagctaaaattcatgtcattgaatttcagaaacgcggactgcctcacgctcacatattattgatattagatagtgagtccaaattacgttcagaagatgacattgaccgtatagttaaggcagaaattccagatgaagaccagtgtcctcgactttttcaaattgtaaaatcaaatatggtacatggaccatgtggaatacaaaatccaaatagtccatgtatggaaaatggaaaatgttcaaagggatatccaaaagaatttcaaaatgcgaccattggaaatattgatggatatcccaaatacaaacgaagatctggtagcaccatgtctattggaaataaagttgtcgataacacttggattgtcccttataacccgtatttgtgccttaaatataactgtcatataaatgttgaagtctgtgcatcaattaaaagtgtcaaatatttatttaaatacatctataaagggcacgattgtgcaaatattcaaatttctgaaaaaaatattatcaatcatgacgaagtacaggacttcattgactccaggtatgtgagcgctcctgaggctgtttggagactttttgcaatgcgaatgcatgaccaatctcatgcaatcacaagattagctattcatttgccaaatgatcagaatttgtattttcataccgatgattttgctgaagttttagatagggctaaaaggcataactcgactttgatggcttggttcttattgaatagagaagattctgatgcacgtaattattattattgggagattccacagcattatgtgtttaataattctttgtggacaaaacgccgaaagggtgggaataaagtattaggtagactgttcactgtgagctttagagaaccagaacgatattaccttagacttttgcttctgcatgtaaaaggtgcgataagttttgaggatctgcgaactgtaggaggtgtaacttatgatacatttcatgaagctgctaaacaccgaggattattacttgatgacactatctggaaagatacgattgacgatgcaatcatccttaatatgcccaaacaactacggcaactttttgcatatatatgtgtgtttggatgtccttctgctgcagacaaattatgggatgagaataaatctcattttattgaagatttctgttggaaattacaccgaagagaaggtgcctgtgtgaactgtgaaatgcatgcccttaacgaaattcaggaggtattcacattgcatggaatgaaatgttcacatttcaaacttccggactatcctttattaatgaatgcaaatacatgtgatcaattgtacgagcaacaacaggcagaggttttgataaattctctgaatgatgaacagttggcagcctttcagactataacttcagccatcgaagatcaaactgtacaccccaaatgctttttcttggatggtccaggtggtagtggaaaaacatatctgtataaagttttaacacattatattagaggtcgtggtggtactgttttacccacagcatctacaggaattgctgcaaatttacttcttggtggaagaacctttcattcccaatataaattaccaattccattaaatgaaacttcaatttctagactcgatataaagagtgaagttgctaaaaccattaaaaaggcccaacttctcattattgatgaatgcaccatggcatccagtcatgctataaacgccatagatagattactaagagaaattatgaatttgaatgttgcatttggtgggaaagttctccttctcggaggggattttcgacaatgtctcagtattgtaccacatgctatgcgatcggccatagtacaaacgagtttaaagtactgtaatgtttggggatgtttcagaaagttgtctcttaaaacaaatatgagatcagaggattctgcttatagtgaatggttagtaaaacttggagatggcaaacttgatagcagttttcatttaggaatggatattattgaaatcccccatgaaatgatttgtaacggatctattattgaagctacctttggaaatagtatatctatagataatattaaaaatatatctaaacgtgcaattctttgtccaaaaaatgagcatgttcaaaaattaaatgaagaaattttggatatacttgatggagattttcacacatatttgagtgatgattccattgattcaacagatgatgctgaaaaggaaaattttcccatcgaatttcttaatagtattactccttcgggaatgccgtgtcataaattaaaattgaaagtgggtgcaatcatcatgctattgagaaatcttaatagtaaatggggtctttgtaatggtactagatttattatcaaaagattacgacctaacattatcgaagctgaagtattaacaggatctgcagagggagaggttgttctgattccaagaattgatttgtccccatctgacactggcctcccatttaaattaattcgaagacagtttcccgtgatgccagcatttgcgatgactattaataaatcacaaggacaaactctagacagagtaggaatattcctacctgaacccgttttcgcacatggtcagttatatgttgctttctctcgagttcgaagagcatgtgacgttaaagttaaagttgtaaatacttcatcacaagggaaattagtcaagcactctgaaagtgtttttactcttaatgtggtatacagggagatattagaataagtttaatcactttatcagtcattgtttgcatcaatgttgtttttatatcatgtttttgttgtttttatatcatgtctttgttgttgttatatcatgttgttattgtttatttattaataaatttatgtattattttcatatacattttactcatttcctttcatctctcacacttctattatagagaaagggcaaatagcaatattaaaatatttcctctaattaattccctttcaatgtgcacgaatttcgtgcaccgggccactag

SEQ ID NO: 17007 - DNA, 4682 bp, synthetic construct
  misc_feature 1..4682: note = Synthetic Sequence
  source 1..4682: mol_type = other DNA
cagaggtgtaaagtacttgagtaattttacttgattactgtacttaagtattatttttggggatttttactttacttgagtacaattaaaaatcaatacttttacttttacttaattacatttttttagaaaaaaaagtactttttactccttacaattttatttacagtcaaaaagtacttattttttggagatcacttcattctattttcccttgctattaccaaaccaattgaattgcgctgatgcccagtttaatttaaatgttatttattctgcctatgaaaatcgttttcacattatatgaaattggtcagacatgttcattggtcctttggaagtgacgtcatgtcacatctattaccacaatgcacagcaccttgacctggaaattagggaaattataacagtcaatcagtggaagaaaatggaggaagtatgtgattcatcagcagctgcgagcagcacagtccaaaatcagccacaggatcaagagcacccgtggccgtatcttcgcgaattcttttctttaagtggtgtaaataaagattcattcaagatgaaatgtgtcctctgtctcccgcttaataaagaaatatcggccttcaaaagttcgccatcaaacctaaggaagcatattgaggtaagtacattaagtattttgttttactgatagtttttttttttttttttttttttttttttgggtgtgcatgttttgacgttgatggcgcgccttttatatgtgtagtaggcctattttcactaatgcatgcgattgacaatataaggctcacgtaataaaatgctaaaatgcatttgtaattggtaacgttaggtccacgggaaatttggcgcctattgcagctttgaataatcattatcattccgtgctctcattgtgtttgaattcatgcaaaacacaagaaaaccaagcgagaaatttttttccaaacatgttgtattgtcaaaacggtaacactttacaatgaggttgattagttcatgtattaactaacattaaataaccatgagcaatacatttgttactgtatctgttaatctttgttaacgttagttaatagaaatacagatgttcattgtttgttcatgttagttcacagtgcattaactaatgttaacaagatataaagtattagtaaatgttgaaattaacatgtatacgtgcagttcattattagttcatgttaactaatgtagttaactaacgaaccttattgtaaaagtgttaccatcaaaactaatgtaatgaaatcaattcaccctgtcatgtcagccttacagtcctgtgtttttgtcaatataatcagaaataaaattaatgtttgattgtcactaaatgctactgtatttctaaaatcaacaagtatttaacattataaagtgtgcaattggctgcaaatgtcagttttattaaagggttagttcacccaaaaatgaaaataatgtcattaatgactcgccctcatgtcgttccaagcccgtaagacctccgttcatcttcagaacacagtttaagatattttagatttagtccgagagctttctgtgcctccattgagaatgtatgtacggtatactgtccatgtccagaaaggtaataaaaacatcaaagtagtccatgtgacatcagtgggttagttagaattttttgaagcatcgaatacattttggtccaaaaataacaaaacctacgactttattcggcattgtattctcttccgggtctgttgtcaatccgcgttcacgacttcgcagtgacgctacaatgctgaataaagtcgtaggttttgttatttttggaccaaaatgtattttcgatgcttcaaataattctacctaacccactgatgtcacatggactactttgatgtttttattacctttctggacatggacagtataccgtacatacattttcagtggagggacagaaagctctcggactaaatctaaaatatcttaaactgtgttccgaagatgaacggaggtgttacgggcttggaacgacatgagggtgagtcattaatgacatcttttcatttttgggtgaactaaccctttaatgctgtaatcagagagtgtatgtgtaattgttacatttattgcatacaatataaatatttatttgttgtttttacagagaatgcacccaaattacctcaaaaactactctaaattgacagcacagaagagaaagatcgggacctccacccatgcttccagcagtaagcaactgaaagttgactcagttttcccagtcaaacatgtgtctccagtcactgtgaacaaagctatattaaggtacatcattcaaggacttcatcctttcagcactgttgatctgccatcatttaaagagctgattagtacactgcagcctggcatttctgtcattacaaggcctactttacgctccaagatagctgaagctgctctgatcatgaaacagaaagtgactgctgccatgagtgaagttgaatggattgcaaccacaacggattgttggactgcacgtagaaagtcattcattggtgtaactgctcactggatcaaccctggaagtcttgaaagacattccgctgcacttgcctgcaaaagattaatgggctctcatacttttgaggtactggccagtgccatgaatgatatccactcagagtatgaaatacgtgacaaggttgtttgcacaaccacagacagtggttccaactttatgaaggctttcagagtttttggtgtggaaaacaatgatatcgagactgaggcaagaaggtgtgaaagtgatgacactgattctgaaggctgtggtgagggaagtgatggtgtggaattccaagatgcctcacgagtcctggaccaagacgatggcttcgaattccagctaccaaaacatcaaaagtgtgcctgtcacttacttaacctagtctcaagcgttgatgcccaaaaagctctctcaaatgaacactacaagaaactctacagatctgtctttggcaaatgccaagctttatggaataaaagcagccgatcggctctagcagctgaagctgttgaatcagaaagccggcttcagcttttaaggccaaaccaaacgcggtggaattcaacttttatggctgttgacagaattcttcaaatttgcaaagaagcaggagaaggcgcacttcggaatatatgcacctctcttgaggttccaatgtaagtgtttttcccctctatcgatgtaaacaaatgtgggttgtttttgtttaatactctttgattatgctgatttctcctgtaggtttaatccagcagaaatgctgttcttgacagagtgggccaacacaatgcgtccagttgcaaaagtactcgacatcttgcaagcggaaacgaatacacagctggggtggctgctgcctagtgtccatcagttaagcttgaaacttcagcgactccaccattctctcaggtactgtgacccacttgtggatgccctacaacaaggaatccaaacacgattcaagcatatgtttgaagatcctgagatcatagcagctgccatccttctccctaaatttcggacctcttggacaaatgatgaaaccatcataaaacgaggtaaatgaatgcaagcaacatacacttgacgaattctaatctgggcaacctttgagccataccaaaattattcttttatttatttatttttgcactttttaggaatgttatatcccatctttggctgtgatctcaatatgaatattgatgtaaagtattcttgcagcaggttgtagttatccctcagtgtttcttgaaaccaaactcatatgtatcatatgtggtttggaaatgcagttagattttatgctaaaataagggatttgcatgattttagatgtagatgactgcacgtaaatgtagttaatgacaaaatccataaaatttgttcccagtcagaagcccctcaaccaaacttttctttgtgtctgctcactgtgcttgtaggcatggactacatcagagtgcatctggagcctttggaccacaagaaggaattggccaacagttcatctgatgatgaagattttttcgcttctttgaaaccgacaacacatgaagccagcaaagagttggatggatatctggcctgtgtttcagacaccagggagtctctgctcacgtttcctgctatttgcagcctctctatcaagactaatacacctcttcccgcatcggctgcctgtgagaggcttttcagcactgcaggattgcttttcagccccaaaagagctaggcttgacactaacaattttgagaatcagcttctactgaagttaaatctgaggttttacaactttgagtagcgtgtactggcattagattgtctgtcttatagtttgataattaaatacaaacagttctaaagcaggataaaaccttgtatgcatttcatttaatgttttttgagattaaaagcttaaacaagaatctctagttttctttcttgcttttacttttacttccttaatactcaagtacaattttaatggagtacttttttacttttactcaagtaagattctagccagatacttttacttttaattgagtaaaattttccctaagtacttgtactttcacttgagtaaaatttttgagtactttttacacctctg

SEQ ID NO: 17008-17011 - skipped (4 entries)

SEQ ID NO: 17012 - protein, 187 aa, synthetic construct
  REGION 1..187: note = Synthetic Sequence
MVGSLNCIVAVSQNMGIGKNGDFPWPPLRNESRYFQRMTTTSSVEGKQNLVIMGKKTWFSIPEKNRPLKGRINLVLSRELKEPPQGAHFLSRSLDDALKLTEQPELANKVDMVWIVGGSSVYKEAMNHPGHLKLFVTRIMQDFESDTFFPEIDLEKYKLLPEYPGVLSDVQEEKGIKYKFEVYEKND

SEQ ID NO: 17013 - protein, 1591 aa, synthetic construct
  REGION 1..1591: note = Synthetic Sequence
MAPKKKRKVEGIKSNISLLKDELRGQISHISHEYLSLIDLAFDSKQNRLFEMKVLELLVNEYGFKGRHLGGSRKPDGIVYSTTLEDNFGIIVDTKAYSEGYSLPISQADEMERYVRENSNRDEEVNPNKWWENFSEEVKKYYFVFISGSFKGKFEEQLRRLSMTTGVNGSAVNVVNLLLGAEKIRSGEMTIEELERAMFNNSEFILKYGGGGSDKKYSIGLAIGTNSVGWAVITDEYKVPSKKFKVLGNTDRHSIKKNLIGALLFDSGETAEATRLKRTARRRYTRRKNRICYLQEIFSNEMAKVDDSFFHRLEESFLVEEDKKHERHPIFGNIVDEVAYHEKYPTIYHLRKKLVDSTDKADLRLIYLALAHMIKFRGHFLIEGDLNPDNSDVDKLFIQLVQTYNQLFEENPINASGVDAKAILSARLSKSRRLENLIAQLPGEKKNGLFGNLIALSLGLTPNFKSNFDLAEDAKLQLSKDTYDDDLDNLLAQIGDQYADLFLAAKNLSDAILLSDILRVNTEITKAPLSASMIKRYDEHHQDLTLLKALVRQQLPEKYKEIFFDQSKNGYAGYIDGGASQEEFYKFIKPILEKMDGTEELLVKLNREDLLRKQRTFDNGSIPHQIHLGELHAILRRQEDFYPFLKDNREKIEKILTFRIPYYVGPLARGNSRFAWMTRKSEETITPWNFEEVVDKGASAQSFIERMTNFDKNLPNEKVLPKHSLLYEYFTVYNELTKVKYVTEGMRKPAFLSGEQKKAIVDLLFKTNRKVTVKQLKEDYFKKIECFDSVEISGVEDRFNASLGTYHDLLKIIKDKDFLDNEENEDILEDIVLTLTLFEDREMIEERLKTYAHLFDDKVMKQLKRRRYTGWGRLSRKLINGIRDKQSGKTILDFLKSDGFANRNFMQLIHDDSLTFKEDIQKAQVSGQGDSLHEHIANLAGSPAIKKGILQTVKVVDELVKVMGRHKPENIVIEMARENQTTQKGQKNSRERMKRIEEGIKELGSQILKEHPVENTQLQNEKLYLYYLQNGRDMYVDQELDINRLSDYDVDAIVPQSFLKDDSIDNKVLTRSDKNRGKSDNVPSEEVVKKMKNYWRQLLNAKLITQRKFDNLTKAERGGLSELDKAGFIKRQLVETRQITKHVAQILDSRMNTKYDENDKLIREVKVITLKSKLVSDFRKDFQFYKVREINNYHHAHDAYLNAVVGTALIKKYPKLESEFVYGDYKVYDVRKMIAKSEQEIGKATAKYFFYSNIMNFFKTEITLANGEIRKRPLIETNGETGEIVWDKGRDFATVRKVLSMPQVNIVKKTEVQTGGFSKESILPKRNSDKLIARKKDWDPKKYGGFDSPTVAYSVLVVAKVEKGKSKKLKSVKELLGITIMERSSFEKNPIDFLEAKGYKEVKKDLIIKLPKYSLFELENGRKRMLASAGELQKGNELALPSKYVNFLYLASHYEKLKGSPEDNEQKQLFVEQHKHYLDEIIEQISEFSKRVILADANLDKVLSAYNKHRDKPIREQAENIIHLFTLTNLGAPAAFKYFDTTIDRKRYTSTKEVLDATLIHQSITGLYETRIDLSQLGGDGSPKKKRKVSS

SEQ ID NO: 17014 - DNA, 4776 bp, synthetic construct
  misc_feature 1..4776: note = Synthetic Sequence
  source 1..4776: mol_type = other DNA
atggcaccaaagaagaaaagaaaagtggagggcatcaagtcaaacatcagcctgctgaaagacgaactgcggggacagattagtcacatcagtcacgagtacctgtcactgattgatctggccttcgacagcaagcagaatagactgtttgagatgaaagtgctggaactgctggtcaacgagtatggcttcaagggcagacatctgggcgggtctaggaaacctgacggcatcgtgtacagtaccacactggaagacaacttcggaatcattgtcgataccaaggcttattccgagggctactctctgccaattagtcaggcagatgagatggaaaggtacgtgcgcgaaaactcaaatagggacgaggaagtcaaccccaataagtggtgggagaatttcagcgaggaagtgaagaaatactacttcgtctttatctcaggcagcttcaaagggaagtttgaggaacagctgcggagactgtccatgactaccggggtgaacggatctgctgtcaacgtggtcaatctgctgctgggcgcagaaaagatcaggtccggggagatgacaattgaggaactggaacgcgccatgttcaacaattctgagtttatcctgaagtatggaggcgggggaagcgataagaaatactccatcggactggccattggcaccaattccgtgggctgggctgtcatcacagacgagtacaaggtgccaagcaagaagttcaaggtcctggggaacaccgatcgccacagtatcaagaaaaatctgattggagccctgctgttcgactcaggcgagactgctgaagcaacccgactgaagcggactgctaggcgccgatatacccggagaaaaaatcggatctgctacctgcaggaaattttcagcaacgagatggccaaggtggacgatagtttctttcaccgcctggaggaatcattcctggtggaggaagataagaaacacgagcggcatcccatctttggcaacattgtggacgaagtcgcttatcacgagaagtaccctactatctatcatctgaggaagaaactggtggactccaccgataaggcagacctgcgcctgatctatctggccctggctcacatgatcaagttccgggggcattttctgatcgagggagatctgaaccctgacaattctgatgtggacaagctgttcatccagctggtccagacatacaatcagctgtttgaggaaaacccaattaatgcctcaggcgtggacgcaaaggccatcctgagcgccagactgtccaaatctaggcgcctggaaaacctgatcgctcagctgccaggagagaagaaaaacggcctgtttgggaatctgattgcactgtccctgggcctgacacccaacttcaagtctaattttgatctggccgaggacgctaagctgcagctgtccaaagacacttatgacgatgacctggataacctgctggctcagatcggcgatcagtacgcagacctgttcctggccgctaagaatctgagtgacgccatcctgctgtcagatattctgcgcgtgaacacagagattactaaggccccactgagtgcttcaatgatcaaaagatatgacgagcaccatcaggatctgaccctgctgaaggctctggtgaggcagcagctgcccgagaaatacaaggaaatcttctttgatcagagcaagaatggatacgccggctatattgacggcggggcttcccaggaggagttctacaagttcatcaagcccattctggaaaagatggacggcaccgaggaactgctggtgaagctgaatcgggaggacctgctgagaaaacagaggacatttgataacggaagcatccctcaccagattcatctgggcgaactgcacgccatcctgcgacggcaggaggacttctacccatttctgaaggataaccgcgagaaaatcgaaaagatcctgaccttcagaatcccctactatgtggggcctctggcacggggaaatagtagatttgcctggatgacaagaaagtcagaggaaactatcaccccctggaacttcgaggaagtggtcgataaaggcgctagcgcacagtccttcattgaaaggatgacaaattttgacaagaacctgccaaatgagaaggtgctgcccaaacacagcctgctgtacgaatatttcacagtgtataacgagctgactaaagtgaagtacgtcaccgaagggatgcgcaagcccgcattcctgtccggagagcagaagaaagccatcgtggacctgctgtttaagacaaatcggaaagtgactgtcaaacagctgaaggaagactatttcaagaaaattgagtgtttcgattcagtggaaatcagcggcgtcgaggacaggtttaacgcctccctggggacctaccacgatctgctgaagatcatcaaggataaggacttcctggacaacgaggaaaatgaggacatcctggaggacattgtgctgacactgactctgtttgaggatcgcgaaatgatcgaggaacgactgaagacttatgcccatctgttcgatgacaaagtgatgaagcagctgaaaagaaggcgctacaccggatggggacgcctgagccgaaaactgatcaatgggattagagacaagcagagcggaaaaactatcctggactttctgaagtccgatggcttcgccaacaggaacttcatgcagctgattcacgatgactctctgaccttcaaggaggacatccagaaagcacaggtgtctggccagggggacagtctgcacgagcatatcgcaaacctggccggcagccccgccatcaagaaagggattctgcagaccgtgaaggtggtggacgaactggtcaaggtcatgggacgacacaaacctgagaacatcgtgattgagatggcccgcgaaaatcagacaactcagaagggccagaaaaacagtcgagaacggatgaagagaatcgaggaaggcatcaaggagctggggtcacagatcctgaaggagcatcctgtggaaaacactcagctgcagaatgagaaactgtatctgtactatctgcagaatggacgggatatgtacgtggaccaggagctggatattaacagactgagtgattatgacgtggatgccatcgtccctcagagcttcctgaaggatgactccattgacaacaaggtgctgaccaggtccgacaagaaccgcggcaaatcagataatgtgccaagcgaggaagtggtcaagaaaatgaagaactactggaggcagctgctgaatgccaagctgatcacacagcggaaatttgataacctgactaaggcagaaagaggaggcctgtctgagctggacaaggccggcttcatcaagcggcagctggtggagacaagacagatcactaagcacgtcgctcagattctggatagcagaatgaacacaaagtacgatgaaaacgacaagctgatcagggaggtgaaagtcattactctgaaatccaagctggtgtctgactttagaaaggatttccagttttataaagtcagggagatcaacaactaccaccatgctcatgacgcatacctgaacgcagtggtcgggaccgccctgattaagaaataccccaagctggagtccgagttcgtgtacggagactataaagtgtacgatgtccggaagatgatcgccaaatctgagcaggaaattggcaaggccaccgctaagtatttcttttacagtaacatcatgaatttctttaagaccgaaatcacactggcaaatggggagatcagaaaaaggcctctgattgagaccaacggggagacaggagaaatcgtgtgggacaagggaagggattttgctaccgtgcgcaaagtcctgtccatgccccaagtgaatattgtcaagaaaactgaagtgcagaccgggggattctctaaggagagtattctgcctaagcgaaactctgataaactgatcgcccggaagaaagactgggaccccaagaagtatggcgggttcgactctccaacagtggcttacagtgtcctggtggtcgcaaaggtggaaaaggggaagtccaagaaactgaagtctgtcaaagagctgctgggaatcactattatggaacgcagctccttcgagaagaatcctatcgattttctggaagccaagggctataaagaggtgaagaaagacctgatcattaagctgccaaaatactcactgtttgagctggaaaacggacgaaagcgaatgctggcaagcgccggagaactgcagaagggcaatgagctggccctgccctccaaatacgtgaacttcctgtatctggctagccactacgagaaactgaaggggtcccctgaggataacgaacagaagcagctgtttgtggagcagcacaaacattatctggacgagatcattgaacagatttcagagttcagcaagagagtgatcctggctgacgcaaatctggataaagtcctgagcgcatacaacaagcaccgagacaaaccaatccgggagcaggccgaaaatatcattcatctgttcaccctgacaaacctgggcgcccctgcagccttcaagtattttgacaccacaatcgatcggaagagatacacttctaccaaagaggtgctggatgctaccctgatccaccagagtattaccggcctgtatgagacacgcatcgacctgtcacagctgggaggcgatgggagccccaagaaaaagcggaaggtgtctagttaa

SEQ ID NO: 17015-17016 - skipped (2 entries)

SEQ ID NO: 17017 - protein, 557 aa, Homo sapiens; identical to SEQ ID NO: 6740

SEQ ID NO: 17018 - protein, 515 aa, Homo sapiens [sequence omitted]

SEQ ID NO: 17019 - protein, 338 aa, Homo sapiens
MVVMAPRTLFLLLSGALTLTETWAGSHSMRYFSAAVSRPGRGEPRFIAMGYVDDTQFVRFDSDSACPRMEPRAPWVEQEGPEYWEEETRNTKAHAQTDRMNLQTLRGYYNQSEASSHTLQWMIGCDLGSDGRLLRGYEQYAYDGKDYLALNEDLRSWTAADTAAQISKRKCEAANVAEQRRAYLEGTCVEWLHRYLENGKEMLQRADPPKTHVTHHPVFDYEATLRCWALGFYPAEIILTWQRDGEDQTQDVELVETRPAGDGTFQKWAAVVVPSGEEQRYTCHVQHEGLPEPLMLRWKQSSLPTIPIMGIVAGLVVLAAVVTGAAVAAVLWRKKSSD

SEQ ID NO: 17020 - protein, 246 aa, Homo sapiens
MVVMAPRTLFLLLSGALTLTETWAGSHSMRYFSAAVSRPGRGEPRFIAMGYVDDTQFVRFDSDSACPRMEPRAPWVEQEGPEYWEEETRNTKAHAQTDRMNLQTLRGYYNQSEADPPKTHVTHHPVFDYEATLRCWALGFYPAEIILTWQRDGEDQTQDVELVETRPAGDGTFQKWAAVVVPSGEEQRYTCHVQHEGLPEPLMLRWKQSSLPTIPIMGIVAGLVVLAAVVTGAAVAAVLWRKKSSD

SEQ ID NO: 17021 - protein, 154 aa, Homo sapiens
MVVMAPRTLFLLLSGALTLTETWAGSHSMRYFSAAVSRPGRGEPRFIAMGYVDDTQFVRFDSDSACPRMEPRAPWVEQEGPEYWEEETRNTKAHAQTDRMNLQTLRGYYNQSEAKQSSLPTIPIMGIVAGLVVLAAVVTGAAVAAVLWRKKSSD

SEQ ID NO: 17022 - protein, 246 aa, Homo sapiens
MVVMAPRTLFLLLSGALTLTETWAGSHSMRYFSAAVSRPGRGEPRFIAMGYVDDTQFVRFDSDSACPRMEPRAPWVEQEGPEYWEEETRNTKAHAQTDRMNLQTLRGYYNQSEASSHTLQWMIGCDLGSDGRLLRGYEQYAYDGKDYLALNEDLRSWTAADTAAQISKRKCEAANVAEQRRAYLEGTCVEWLHRYLENGKEMLQRAKQSSLPTIPIMGIVAGLVVLAAVVTGAAVAAVLWRKKSSD

SEQ ID NO: 17023 - protein, 319 aa, Homo sapiens
MVVMAPRTLFLLLSGALTLTETWAGSHSMRYFSAAVSRPGRGEPRFIAMGYVDDTQFVRFDSDSACPRMEPRAPWVEQEGPEYWEEETRNTKAHAQTDRMNLQTLRGYYNQSEASSHTLQWMIGCDLGSDGRLLRGYEQYAYDGKDYLALNEDLRSWTAADTAAQISKRKCEAANVAEQRRAYLEGTCVEWLHRYLENGKEMLQRADPPKTHVTHHPVFDYEATLRCWALGFYPAEIILTWQRDGEDQTQDVELVETRPAGDGTFQKWAAVVVPSGEEQRYTCHVQHEGLPEPLMLRWSKEGDGGIMSVRESRSLSEDL

SEQ ID NO: 17024 - protein, 227 aa, Homo sapiens
MVVMAPRTLFLLLSGALTLTETWAGSHSMRYFSAAVSRPGRGEPRFIAMGYVDDTQFVRFDSDSACPRMEPRAPWVEQEGPEYWEEETRNTKAHAQTDRMNLQTLRGYYNQSEADPPKTHVTHHPVFDYEATLRCWALGFYPAEIILTWQRDGEDQTQDVELVETRPAGDGTFQKWAAVVVPSGEEQRYTCHVQHEGLPEPLMLRWSKEGDGGIMSVRESRSLSEDL

SEQ ID NO: 17025 - protein, 116 aa, Homo sapiens
MVVMAPRTLFLLLSGALTLTETWAGSHSMRYFSAAVSRPGRGEPRFIAMGYVDDTQFVRFDSDSACPRMEPRAPWVEQEGPEYWEEETRNTKAHAQTDRMNLQTLRGYYNQSEASE

SEQ ID NO: 17026 - protein, 526 aa, Homo sapiens
MGHLSAPLHRVRVPWQGLLLTASLLTFWNPPTTAQLTTESMPFNVAEGKEVLLLVHNLPQQLFGYSWYKGERVDGNRQIVGYAIGTQQATPGPANSGRETIYPNASLLIQNVTQNDTGFYTLQVIKSDLVNEEATGQFHVYPELPKPSISSNNSNPVEDKDAVAFTCEPETQDTTYLWWINNQSLPVSPRLQLSNGNRTLTLLSVTRNDTGPYECEIQNPVSANRSDPVTLNVTYGPDTPTISPSDTYYRPGANLSLSCYAASNPPAQYSWLINGTFQQSTQELFIPNITVNNSGSYTCHANNSVTGCNRTTVKTIIVTELSPVVAKPQIKASKTTVTGDKDSVNLTCSTNDTGISIRWFFKNQSLPSSERMKLSQGNTTLSINPVKREDAGTYWCEVFNPISKNQSDPIMLNVNYNALPQENGLSPGAIAGIVIGVVALVALIAVALACFLHFGKTGRASDQRDLTEHKPSVSNHTQDHSNDPPNKMNEVTYSTLNFEAQQPTQPTSASPSLTATEIIYSEVKKQ

SEQ ID NO: 17027 - protein, 565 aa, synthetic construct
MKAKLLVLLCTFTATYADTICIGYHANNSTDTVDTVLEKNVTVTHSVNLLEDSHNGKLCLLKGIAPLQLGNCSVAGWILGNPECELLISKESWSYIVETPNPENGTCYPGYFADYEELREQLSSVSSFERFEIFPKESSWPNHTVTGVSASCSHNGKSSFYRNLLWLTGKNGLYPNLSKSYVNNKEKEVLVLWGVHHPPNIGNQRALYHTENAYVSVVSSHYSRRFTPEIAKRPKVRDQEGRINYYWTLLEPGDTIIFEANGNLIAPWYAFALSRGFGSGIITSNAPMDECDAKCQTPQGAINSSLPFQNVHPVTIGECPKYVRSAKLRMVTGLRNIPSIQSRGLFGAIAGFIEGGWTGMVDGWYGYHHQNEQGSGYAADQKSTQNAINGITNKVNSVIEKMNTQFTAVGKEFNKLERRMENLNKKVDDGFLDIWTYNAELLVLLENERTLDFHDSNVKNLYEKVKSQLKNNAKEIGNGCFEFYHKCNNECMESVKNGTYDYPKYSEESKLNREKIDGVKLESMGVYQILAIYSTVASSLVLLVSLGAISFWMCSNGSLQCRICI

SEQ ID NO: 17028 - protein, 243 aa, Homo sapiens; identical to SEQ ID NO: 2367

SEQ ID NO: 17029 - protein, 191 aa, Homo sapiens
MHDSNNVEKDITPSELPANPGCLHSKEHSIKATLIWRLFFLIMFLTIIVCGMVAALSAIRANCHQEPSVCLQAACPESWIGFQRKCFYFSDDTKNWTSSQRFCDSQDADLAQVESFQELNFLLRYKGPSDHWIGLSREQGQPWKWINGTEWTRQFPILGAGECAYLNDKGASSARHYTERKWICSKSDIHV

SEQ ID NO: 17030 - protein, 246 aa, Homo sapiens
MAAAAATKILLCLPLLLLLSGWSRAGRADPHSLCYDITVIPKFRPGPRWCAVQGQVDEKTFLHYDCGNKTVTPVSPLGKKLNVTTAWKAQNPVLREVVDILTEQLRDIQLENYTPKEPLTLQARMSCEQKAEGHSSGSWQFSFDGQIFLLFDSEKRMWTTVHPGARKMKEKWENDKVVAMSFHYFSMGDCIGWLEDFLMGMDSTLEPSAGAPLAMSSGTTQLRATATTLILCCLLIILPCFILPGI

SEQ ID NO: 17031 - protein, 244 aa, Homo sapiens; identical to SEQ ID NO: 13925

SEQ ID NO: 17032 - protein, 383 aa, Homo sapiens
MGLGPVFLLLAGIFPFAPPGAAAEPHSLRYNLTVLSWDGSVQSGFLTEVHLDGQPFLRCDRQKCRAKPQGQWAEDVLGNKTWDRETRDLTGNGKDLRMTLAHIKDQKEGLHSLQEIRVCEIHEDNSTRSSQHFYYDGELFLSQNLETKEWTMPQSSRAQTLAMNVRNFLKEDAMKTKTHYHAMHADCLQELRRYLKSGVVLRRTVPPMVNVTRSEASEGNITVTCRASGFYPWNITLSWRQDGVSLSHDTQQWGDVLPDGNGTYQTWVATRICQGEEQRFTCYMEHSGNHSTHPVPSGKVLVLQSHWQTFHVSAVAAAAIFVIIIFYVRCCKKKTSAAEGPELVSLQVLDQHPVGTSDHRDATQLGFQPLMSDLGSTGSTEGA

SEQ ID NO: 17033 - protein, 383 aa, Homo sapiens; identical to SEQ ID NO: 17032

SEQ ID NO: 17034 - protein, 294 aa, Homo sapiens
MGGVLLTQRTLLSLVLALLFPSMASMEPHSLRYNLTVLSWDGSVQSGFLTEVHLDGQPFLRCDRQKCRAKPQGQWAEDVLGNKTWDRETRDLTGNGKDLRMTLAHIKDQKEGLHSLQEIRVCEIHEDNSTRSSQHFYYDGELFLSQNLETKEWTMPQSSRAQTLTHYHAMHADCLQELRRYLKSGVVLRRTVPPMVNVTRSEASEGNITVTCRASGFYPWNITLSWRQDGVSLSHDTQQWGDVLPDGNGTYQTWVATRICQGEEQRFTCYMEHSGNHSTHPVPSGKVLVLQSHW

SEQ ID NO: 17035 - protein, 296 aa, Homo sapiens
MGGVLLTQRTLLSLVLALLFPSMASMEPHSLRYNLTVLSWDGSVQSGFLTEVHLDGQPFLRCDRQKCRAKPQGQWAEDVLGNKTWDRETRDLTGNGKLDLRMTLAHIKLDQKEGLHSLQEIRVCEIHEDNSTRSSQHFYYNGELFLSQNLETKEWTMPQSSRAQTLTHYHAMHADCLQELRRYLKSGVVLRRTVPPMVDVTRSEASEGNITVTCRASGFYPWNITLSWRQDGVSLSHDTQQWGDVLPDGNGTYQTWVATRICQGEEQRFTCYMEHSGNHSTHPVPSGKVLVLQSHW

SEQ ID NO: 17036-17057 - skipped (22 entries)

SEQ ID NO: 17058 - protein, 1588 aa, synthetic construct
  REGION 1..1588: note = Synthetic Sequence
MPKKKRKVEGIKSNISLLKDELRGQISHISHEYLSLIDLAFDSKQNRLFEMKVLELLVNEYGFKGRHLGGSRKPDGIVYSTTLEDNFGIIVDTKAYSEGYSLPISQADEMERYVRENSNRDEEVNPNKWWENFSEEVKKYYFVFISGSFKGKFEEQLRRLSMTTGVNGSAVNVVNLLLGAEKIRSGEMTIEELERAMFNNSEFILKYGGGGSDKKYSIGLAIGTNSVGWAVITDEYKVPSKKFKVLGNTDRHSIKKNLIGALLFDSGETAEATRLKRTARRRYTRRKNRICYLQEIFSNEMAKVDDSFFHRLEESFLVEEDKKHERHPIFGNIVDEVAYHEKYPTIYHLRKKLVDSTDKADLRLIYLALAHMIKFRGHFLIEGDLNPDNSDVDKLFIQLVQTYNQLFEENPINASGVDAKAILSARLSKSRRLENLIAQLPGEKKNGLFGNLIALSLGLTPNFKSNFDLAEDAKLQLSKDTYDDDLDNLLAQIGDQYADLFLAAKNLSDAILLSDILRVNTEITKAPLSASMIKRYDEHHQDLTLLKALVRQQLPEKYKEIFFDQSKNGYAGYIDGGASQEEFYKFIKPILEKMDGTEELLVKLNREDLLRKQRTFDNGSIPHQIHLGELHAILRRQEDFYPFLKDNREKIEKILTFRIPYYVGPLARGNSRFAWMTRKSEETITPWNFEEVVDKGASAQSFIERMTNFDKNLPNEKVLPKHSLLYEYFTVYNELTKVKYVTEGMRKPAFLSGEQKKAIVDLLFKTNRKVTVKQLKEDYFKKIECFDSVEISGVEDRFNASLGTYHDLLKIIKDKDFLDNEENEDILEDIVLTLTLFEDREMIEERLKTYAHLFDDKVMKQLKRRRYTGWGRLSRKLINGIRDKQSGKTILDFLKSDGFANRNFMQLIHDDSLTFKEDIQKAQVSGQGDSLHEHIANLAGSPAIKKGILQTVKVVDELVKVMGRHKPENIVIEMARENQTTQKGQKNSRERMKRIEEGIKELGSQILKEHPVENTQLQNEKLYLYYLQNGRDMYVDQELDINRLSDYDVDAIVPQSFLKDDSIDNKVLTRSDKNRGKSDNVPSEEVVKKMKNYWRQLLNAKLITQRKFDNLTKAERGGLSELDKAGFIKRQLVETRQITKHVAQILDSRMNTKYDENDKLIREVKVITLKSKLVSDFRKDFQFYKVREINNYHHAHDAYLNAVVGTALIKKYPKLESEFVYGDYKVYDVRKMIAKSEQEIGKATAKYFFYSNIMNFFKTEITLANGEIRKRPLIETNGETGEIVWDKGRDFATVRKVLSMPQVNIVKKTEVQTGGFSKESILPKRNSDKLIARKKDWDPKKYGGFDSPTVAYSVLVVAKVEKGKSKKLKSVKELLGITIMERSSFEKNPIDFLEAKGYKEVKKDLIIKLPKYSLFELENGRKRMLASAGELQKGNELALPSKYVNFLYLASHYEKLKGSPEDNEQKQLFVEQHKHYLDEIIEQISEFSKRVILADANLDKVLSAYNKHRDKPIREQAENIIHLFTLTNLGAPAAFKYFDTTIDRKRYTSTKEVLDATLIHQSITGLYETRIDLSQLGGDGSPKKKRKV

SEQ ID NO: 17059 - DNA, 4767 bp, synthetic construct
  misc_feature 1..4767: note = Synthetic Sequence
  source 1..4767: mol_type = other DNA
atgcctaagaagaagcggaaggtggaaggcatcaaaagcaacatctccctcctgaaagacgaactccgggggcagattagccacattagtcacgaatacctctccctcatcgacctggctttcgatagcaagcagaacaggctctttgagatgaaagtgctggaactgctcgtcaatgagtacgggttcaagggtcgacacctcggcggatctaggaaaccagacggcatcgtgtatagtaccacactggaagacaactttgggatcattgtggataccaaggcatactctgagggttatagtctgcccatttcacaggccgacgagatggaacggtacgtgcgcgagaactcaaatagagatgaggaagtcaaccctaacaagtggtgggagaacttctctgaggaagtgaagaaatactacttcgtctttatcagcgggtccttcaagggtaaatttgaggaacagctcaggagactgagcatgactaccggcgtgaatggcagcgccgtcaacgtggtcaatctgctcctgggcgctgaaaagattcggagcggagagatgaccatcgaagagctggagagggcaatgtttaataatagcgagtttatcctgaaatacggtggcggtggatccgataaaaagtattctattggtttagccatcggcactaattccgttggatgggctgtcataaccgatgaatacaaagtaccttcaaagaaatttaaggtgttggggaacacagaccgtcattcgattaaaaagaatcttatcggtgccctcctattcgatagtggcgaaacggcagaggcgactcgcctgaaacgaaccgctcggagaaggtatacacgtcgcaagaaccgaatatgttacttacaagaaatttttagcaatgagatggccaaagttgacgattctttctttcaccgtttggaagagtccttccttgtcgaagaggacaagaaacatgaacggcaccccatctttggaaacatagtagatgaggtggcatatcatgaaaagtacccaacgatttatcacctcagaaaaaagctagttgactcaactgataaagcggacctgaggttaatctacttggctcttgcccatatgataaagttccgtgggcactttctcattgagggtgatctaaatccggacaactcggatgtcgacaaactgttcatccagttagtacaaacctataatcagttgtttgaagagaaccctataaatgcaagtggcgtggatgcgaaggctattcttagcgcccgcctctctaaatcccgacggctagaaaacctgatcgcacaattacccggagagaagaaaaatgggttgttcggtaaccttatagcgctctcactaggcctgacaccaaattttaagtcgaacttcgacttagctgaagatgccaaattgcagcttagtaaggacacgtacgatgacgatctcgacaatctactggcacaaattggagatcagtatgcggacttatttttggctgccaaaaaccttagcgatgcaatcctcctatctgacatactgagagttaatactgagattaccaaggcgccgttatccgcttcaatgatcaaaaggtacgatgaacatcaccaagacttgacacttctcaaggccctagtccgtcagcaactgcctgagaaatataaggaaatattctttgatcagtcgaaaaacgggtacgcaggttatattgacggcggagcgagtcaagaggaattctacaagtttatcaaacccatattagagaagatggatgggacggaagagttgcttgtaaaactcaatcgcgaagatctactgcgaaagcagcggactttcgacaacggtagcattccacatcaaatccacttaggcgaattgcatgctatacttagaaggcaggaggatttttatccgttcctcaaagacaatcgtgaaaagattgagaaaatcctaacctttcgcataccttactatgtgggacccctggcccgagggaactctcggttcgcatggatgacaagaaagtccgaagaaacgattactccatggaattttgaggaagttgtcgataaaggtgcgtcagctcaatcgttcatcgagaggatgaccaactttgacaagaatttaccgaacgaaaaagtattgcctaagcacagtttactttacgagtatttcacagtgtacaatgaactcacgaaagttaagtatgtcactgagggcatgcgtaaacccgcctttctaagcggagaacagaagaaagcaatagtagatctgttattcaagaccaaccgcaaagtgacagttaagcaattgaaagaggactactttaagaaaattgaatgcttcgattctgtcgagatctccggggtagaagatcgatttaatgcgtcacttggtacgtatcatgacctcctaaagataattaaagataaggacttcctggataacgaagagaatgaagatatcttagaagatatagtgttgactcttaccctctttgaagatcgggaaatgattgaggaaagactaaaaacatacgctcacctgttcgacgataaggttatgaaacagttaaagaggcgtcgctatacgggctggggacgattgtcgcggaaacttatcaacgggataagagacaagcaaagtggtaaaactattctcgattttctaaagagcgacggcttcgccaataggaactttatgcagctgatccatgatgactctttaaccttcaaagaggatatacaaaaggcacaggtttccggacaaggggactcattgcacgaacatattgcgaatcttgctggttcgccagccatcaaaaagggcatactccagacagtcaaagtagtggatgagctagttaaggtcatgggacgtcacaaaccggaaaacattgtaatcgagatggcacgcgaaaatcaaacgactcagaaggggcaaaaaaacagtcgagagcggatgaagagaatagaagagggtattaaagaactgggcagccagatcttaaaggagcatcctgtggaaaatacccaattgcagaacgagaaactttacctctattacctacaaaatggaagggacatgtatgttgatcaggaactggacataaaccgtttatctgattacgacgtcgatgccattgtaccccaatcctttttgaaggacgattcaatcgacaataaagtgcttacacgctcggataagaaccgagggaaaagtgacaatgttccaagcgaggaagtcgtaaagaaaatgaagaactattggcggcagctcctaaatgcgaaactgataacgcaaagaaagttcgataacttaactaaagctgagaggggtggcttgtctgaacttgacaaggccggatttattaaacgtcagctcgtggaaacccgccaaatcacaaagcatgttgcacagatactagattcccgaatgaatacgaaatacgacgagaacgataagctgattcgggaagtcaaagtaatcactttaaagtcaaaattggtgtcggacttcagaaaggattttcaattctataaagttagggagataaataactaccaccatgcgcacgacgcttatcttaatgccgtcgtagggaccgcactcattaagaaatacccgaagctagaaagtgagtttgtgtatggtgattacaaagtttatgacgtccgtaagatgatcgcgaaaagcgaacaggagataggcaaggctacagccaaatacttcttttattctaacattatgaatttctttaagacggaaatcactctggcaaacggagagatacgcaaacgacctttaattgaaaccaatggggagacaggtgaaatcgtatgggataagggccgggacttcgcgacggtgagaaaagttttgtccatgccccaagtcaacatagtaaagaaaactgaggtgcagaccggagggttttcaaaggaatcgattcttccaaaaaggaatagtgataagctcatcgctcgtaaaaaggactgggacccgaaaaagtacggtggcttcgatagccctacagttgcctattctgtcctagtagtggcaaaagttgagaagggaaaatccaagaaactgaagtcagtcaaagaattattggggataacgattatggagcgctcgtcttttgaaaagaaccccatcgacttccttgaggcgaaaggttacaaggaagtaaaaaaggatctcataattaaactaccaaagtatagtctgtttgagttagaaaatggccgaaaacggatgttggctagcgccggagagcttcaaaaggggaacgaactcgcactaccgtctaaatacgtgaatttcctgtatttagcgtcccattacgagaagttgaaaggttcacctgaagataacgaacagaagcaactttttgttgagcagcacaaacattatctcgacgaaatcatagagcaaatttcggaattcagtaagagagtcatcctagctgatgccaatctggacaaagtattaagcgcatacaacaagcacagggataaacccatacgtgagcaggcggaaaatattatccatttgtttactcttaccaacctcggcgctccagccgcattcaagtattttgacacaacgatagatcgcaaacgatacacttctaccaaggaggtgctagacgcgacactgattcaccaatccatcacgggattatatgaaactcggatagatttgtcacagcttgggggtgacggatcccccaagaagaagaggaaagtctga

SEQ ID NO: 17060-17094 - skipped (35 entries)

SEQ ID NO: 17095 - DNA, 561 bp, synthetic construct
  misc_feature 1..561: note = Synthetic Sequence
  source 1..561: mol_type = other DNA
atggtcgggtctctgaattgtatcgtcgccgtgagtcagaacatgggcattgggaagaatggcgatttcccatggccacctctgcgcaacgagtcccgatactttcagcggatgacaactacctcctctgtggaagggaaacagaatctggtcatcatgggaaagaaaacttggttcagcattccagagaagaaccggcccctgaaaggcagaatcaatctggtgctgtcccgagaactgaaggagccaccacagggagctcactttctgagccggtccctggacgatgcactgaagctgacagaacagcctgagctggccaacaaagtcgatatggtgtggatcgtcgggggaagttcagtgtataaggaggccatgaatcaccccggccatctgaaactgttcgtcacacggatcatgcaggactttgagagcgatactttctttcctgaaattgacctggagaagtacaaactgctgcccgaatatcctggcgtgctgtccgatgtccaggaagagaaaggcatcaaatacaagttcgaggtctatgagaagaatgac

SEQ ID NO: 17096 - DNA, 35 bp, synthetic construct
  misc_feature 1..35: note = Synthetic Sequence
  source 1..35: mol_type = other DNA
ccctagaaagatagtctgcgtaaaattgacgcatg

SEQ ID NO: 17097 - DNA, 63 bp, synthetic construct
  misc_feature 1..63: note = Synthetic Sequence
  source 1..63: mol_type = other DNA
ccctagaaagataatcatattgtgacgtacgttaaagataatcatgcgtaaaattgacgcatg

SEQ ID NO: 17098 - DNA, 63 bp, synthetic construct
  misc_feature 1..63: note = Synthetic Sequence
  source 1..63: mol_type = other DNA
ccctagaaagataatcatattgtgacgtacgttaaagataatcatgtgtaaaattgacgcatg

SEQ ID NO: 17099 - DNA, 241 bp, synthetic construct
  misc_feature 1..241: note = Synthetic Sequence
  source 1..241: mol_type = other DNA
ttaaccctagaaagataatcatattgtgacgtacgttaaagataatcatgtgtaaaattgacgcatgtgttttatcggtctgtatatcgaggtttatttattaatttgaatagatattaagttttattatatttacacttacatactaataataaattcaacaaacaatttatttatgtttatttatttattaaaaaaaacaaaaactcaaaatttcttctataaagtaacaaaactttta

SEQ ID NO: 17100-17499 - skipped (400 entries)

SEQ ID NO: 17500 - DNA, 5296 bp, synthetic construct; identical to SEQ ID NO: 17006
  misc_feature 1..5296: note = Synthetic Sequence
  source 1..5296: mol_type = other DNA

SEQ ID NO: 17501 - DNA, 4682 bp, synthetic construct; identical to SEQ ID NO: 17007
  misc_feature 1..4682: note = Synthetic Sequence
  source 1..4682: mol_type = other DNA

SEQ ID NO: 17502 - DNA, 4897 bp, synthetic construct
  misc_feature 1..4897: note = Synthetic Sequence
  source 1..4897: mol_type = other DNA
tgtacatagattaaccctagaaagataatcatattgtgacgtacgttaaagataatcatgcgtaaaattgacgcatgtgttttatcggtctgtatatcgaggtttatttattaatttgaatagatattaagttttattatatttacacttacatactaataataaattcaacaaacaatttatttatgtttatttatttattaaaaaaaaacaaaaactcaaaatttcttctataaagtaacaaaacttttatcgaatacctgcagcccgggggatgcagagggacagcccccccccaaagcccccagggatgtaattacgtccctcccccgctagggggcagcagcgagccgcccggggctccgctccggtccggcgctccccccgcatccccgagccggcagcgtgcggggacagcccgggcacggggaaggtggcacgggatcgctttcctctgaacgcttctcgctgctctttgagcctgcagacacctggggggatacggggaaaagttgactgtgcctttcgatcgaaccatggacagttagctttgcaaagatggataaagttttaaacagagaggaatctttgcagctaatggaccttctaggtcttgaaaggagtgggaattggctccggtgcccgtcagtgggcagagcgcacatcgcccacagtccccgagaagttggggggaggggtcggcaattgaaccggtgcctagagaaggtggcgcggggtaaactgggaaagtgatgtcgtgtactggctccgcctttttcccgagggtgggggagaaccgtatataagtgcagtagtcgccgtgaacgttctttttcgcaacgggtttgccgccagaacacaggtaagtgccgtgtgtggttcccgcgggcctggcctctttacgggttatggcccttgcgtgccttgaattacttccacctggctgcagtacgtgattcttgatcccgagcttcgggttggaagtgggtgggagagttcgaggccttgcgcttaaggagccccttcgcctcgtgcttgagttgaggcctggcctgggcgctggggccgccgcgtgcgaatctggtggcaccttcgcgcctgtctcgctgctttcgataagtctctagccatttaaaatttttgatgacctgctgcgacgctttttttctggcaagatagtcttgtaaatgcgggccaagatctgcacactggtatttcggtttttggggccgcgggcggcgacggggcccgtgcgtcccagcgcacatgttcggcgaggcggggcctgcgagcgcggccaccgagaatcggacgggggtagtctcaagctggccggcctgctctggtgcctggcctcgcgccgccgtgtatcgccccgccctgggcggcaaggctggcccggtcggcaccagttgcgtgagcggaaagatggccgcttcccggccctgctgcagggagctcaaaatggaggacgcggcgctcgggagagcgggcgggtgagtcacccacacaaaggaaaagggcctttccgtcctcagccgtcgcttcatgtgactccacggagtaccgggcgccgtccaggcacctcgattagttctcgagcttttggagtacgtcgtctttaggttggggggaggggttttatgcgatggagtttccccacactgagtgggtggagactgaagttaggccagcttggcacttgatgtaattctccttggaatttgccctttttgagtttggatcttggttcattctcaagcctcagacagtggttcaaagtttttttcttccatttcaggtgtcgtgagaattctaatacgactcactatagggtgtgctgtctcatcattttggcaaagattggccaccaagcttgtcctgcaggagggtcgacgcctctagacgggcggccgctccggatccacgggtaccgatcacatatgcctttaattaaacactagttctatagtgtcacctaaattccctttagtgagggttaatggccgtaggccgccagaattgggtccagacatgataagatacattgatgagtttggacaaaccacaactagaatgcagtgaaaaaaatgctttatttgtgaaatttgtgatgctattgctttatttgtaaccattataagctgcaataaacaagttaacaacaacaattgcattcattttatgtttcaggttcagggggaggtgtgggaggttttttcggactctaggacctgcgcatgcgcttggcgtaatcatggtcatagctgtttcctgttttccccgtatccccccaggtgtctgcaggctcaaagagcagcgagaagcgttcagaggaaagcgatcccgtgccaccttccccgtgcccgggctgtccccgcacgctgccggctcggggatgcggggggagcgccggaccggagcggagccccgggcggctcgctgctgccccctagcgggggagggacgtaattacatccctgggggctttgggggggggctgtccctctcaccgcggtggagctccagcttttgttcgaattggggccccccctcgagggtatcgatgatatctataacaagaaaatatatatataataagttatcacgtaagtagaacatgaaataacaatataattatcgtatgagttaaatcttaaaagtcacgtaaaagataatcatgcgtcattttgactcacgcggtcgttatagttcaaaatcagtgacacttaccgcattgacaagcacgcctcacgggagctccaagcggcgactgagatgtcctaaatgcacagcgacggattcgcgctatttagaaagagagagcaatatttcaagaatgcatgcgtcaattttacgcagactatctttctagggttaatctagctagccttaagggcgcctattgcgttgcgctcactgcccgctttccagtcgggaaacctgtcgtgccagctgcattaatgaatcggccaacgcgcggggagaggcggtttgcgtattgggcgctcttccgcttcctcgctcactgactcgctgcgctcggtcgttcggctgcggcgagcggtatcagctcactcaaaggcggtaatacggttatccacagaatcaggggataacgcaggaaagaacatgaccaaaatcccttaacgtgagttttcgttccactgagcgtcagaccccgtagaaaagatcaaaggatcttcttgagatcctttttttctgcgcgtaatctgctgcttgcaaacaaaaaaaccaccgctaccagcggtggtttgtttgccggatcaagagctaccaactctttttccgaaggtaactggcttcagcagagcgcagataccaaatactgttcttctagtgtagccgtagttaggccaccacttcaagaactctgtagcaccgcctacatacctcgctctgctaatcctgttaccagtggctgctgccagtggcgataagtcgtgtcttaccgggttggactcaagacgatagttaccggataaggcgcagcggtcgggctgaacggggggttcgtgcacacagcccagcttggagcgaacgacctacaccgaactgagatacctacagcgtgagctatgagaaagcgccacgcttcccgaagggagaaaggcggacaggtatccggtaagcggcagggtcggaacaggagagcgcacgagggagcttccagggggaaacgcctggtatctttatagtcctgtcgggtttcgccacctctgacttgagcgtcgatttttgtgatgctcgtcaggggggcggagcctatggaaaaacgccagcaacgcggcctttttacggttcctggccttttgctggccttttgctcacatgagattatcaaaaaggatcttcacctagatccttttaaattaaaaatgaagttttaaatcaatctaaagtatatatgagtaaacttggtctgacagtcagaagaactcgtcaagaaggcgatagaaggcgatgcgctgcgaatcgggagcggcgataccgtaaagcacgaggaagcggtcagcccattcgccgccaagctcttcagcaatatcacgggtagccaacgctatgtcctgatagcggtccgccacacccagccggccacagtcgatgaatccagaaaagcggccattttccaccatgatattcggcaagcaggcatcgccatgggtcacgacgagatcctcgccgtcgggcatgctcgccttgagcctggcgaacagttcggctggcgcgagcccctgatgctcttcgtccagatcatcctgatcgacaagaccggcttccatccgagtacgtgctcgctcgatgcgatgtttcgcttggtggtcgaatgggcaggtagccggatcaagcgtatgcagccgccgcattgcatcagccatgatggatactttctcggcaggagcaaggtgagatgacaggagatcctgccccggcacttcgcccaatagcagccagtcccttcccgcttcagtgacaacgtcgagcacagctgcgcaaggaacgcccgtcgtggccagccacgatagccgcgctgcctcgtcttgcagttcattcagggcaccggacaggtcggtcttgacaaaaagaaccgggcgcccctgcgctgacagccggaacacggcggcatcagagcagccgattgtctgttgtgcccagtcatagccgaatagcctctccacccaagcggccggagaacctgcgtgcaatccatcttgttcaatcataatattattgaagcatttatcagggttcgtctcgtcccggtctcctcccaatgcatgtcaatattggccattagccatattattcattggttatatagcataaatcaatattggctattggccattgcatacgttgtatctatatcataata

SEQ ID NO: 17503 - protein, 21 aa, Homo sapiens
MALPVTALLLPLALLLHAARP

SEQ ID NO: 17504 - DNA, 63 bp, Homo sapiens
  source 1..63: mol_type = other DNA
atggcactgccagtcaccgccctgctgctgcctctggctctgctgctgcacgcagctagacca

SEQ ID NO: 17505 - protein, 24 aa, Homo sapiens
IYIWAPLAGTCGVLLLSLVITLYC

SEQ ID NO: 17506 - DNA, 72 bp, Homo sapiens
  source 1..72: mol_type = other DNA
atctacatttgggcaccactggccgggacctgtggagtgctgctgctgagcctggtcatcacactgtactgc

SEQ ID NO: 17507 - protein, 112 aa, Homo sapiens
RVKFSRSADAPAYKQGQNQLYNELNLGRREEYDVLDKRRGRDPEMGGKPRRKNPQEGLYNELQKDKMAEAYSEIGMKGERRRGKGHDGLYQGLSTATKDTYDALHMQALPPR

SEQ ID NO: 17508 - DNA, 336 bp, Homo sapiens
  source 1..336: mol_type = other DNA
cgcgtgaagtttagtcgatcagcagatgccccagcttacaaacagggacagaaccagctgtataacgagctgaatctgggccgccgagaggaatatgacgtgctggataagcggagaggacgcgaccccgaaatgggaggcaagcccaggcgcaaaaaccctcaggaaggcctgtataacgagctgcagaaggacaaaatggcagaagcctattctgagatcggcatgaagggggagcgacggagaggcaaagggcacgatgggctgtaccagggactgagcaccgccacaaaggacacctatgatgctctgcatatgcaggcactgcctccaagg

SEQ ID NO: 17509 - protein, 42 aa, Homo sapiens
KRGRKKLLYIFKQPFMRPVQTTQEEDGCSCRFPEEEEGGCEL

SEQ ID NO: 17510 - DNA, 126 bp, Homo sapiens
  source 1..126: mol_type = other DNA
aagagaggcaggaagaaactgctgtatattttcaaacagcccttcatgcgccccgtgcagactacccaggaggaagacgggtgctcctgtcgattccctgaggaagaggaaggcgggtgtgagctg

SEQ ID NO: 17511 - protein, 45 aa, Homo sapiens
TTTPAPRPPTPAPTIASQPLSLRPEACRPAAGGAVHTRGLDFACD

SEQ ID NO: 17512 - DNA, 135 bp, Homo sapiens
  source 1..135: mol_type = other DNA
actaccacaccagcacctagaccaccaactccagctccaaccatcgcgagtcagcccctgagtctgagacctgaggcctgcaggccagctgcaggaggagctgtgcacaccaggggcctggacttcgcctgcgac

SEQ ID NO: 17513 - DNA, 135 bp, Homo sapiens
  source 1..135: mol_type = other DNA
accacaacccctgcccccagacctcccacacccgcccctaccatcgcgagtcagcccctgagtctgagacctgaggcctgcaggccagctgcaggaggagctgtgcacaccaggggcctggacttcgcctgcgac

SEQ ID NO: 17514 - protein, 89 aa, Homo sapiens
LPAPKNLVVSEVTEDSLRLSWTAPDAAFDSFLIQYQESEKVGEAINLTVPGSERSYDLTGLKPGTEYTVSIYGVKGGHRSNPLSAEFTT

SEQ ID NO: 17515 - protein, 90 aa, Homo sapiens
MLPAPKNLVVSEVTEDSLRLSWTAPDAAFDSFLIQYQESEKVGEAINLTVPGSERSYDLTGLKPGTEYTVSIYGVKGGHRSNPLSAEFTT

SEQ ID NO: 17516 - protein, 4 aa, synthetic construct
  REGION 1..4: note = Synthetic Sequence
TEDS

SEQ ID NO: 17517 - protein, 7 aa, synthetic construct
  REGION 1..7: note = Synthetic Sequence
TAPDAAF

SEQ ID NO: 17518 - protein, 6 aa, synthetic construct
  REGION 1..6: note = Synthetic Sequence
SEKVGE

SEQ ID NO: 17519 - protein, 4 aa, synthetic construct
  REGION 1..4: note = Synthetic Sequence
GSER

SEQ ID NO: 17520 - protein, 5 aa, synthetic construct
  REGION 1..5: note = Synthetic Sequence
GLKPG

SEQ ID NO: 17521 - protein, 7 aa, synthetic construct
  REGION 1..7: note = Synthetic Sequence
KGGHRSN

SEQ ID NO: 17522-17999 - skipped (478 entries)

SEQ ID NO: 18000 - protein, 362 aa, synthetic construct
  REGION 1..362: note = Synthetic Sequence
MALPVTALLLPLALLLHAARPEVQLLESGGGLVQPGGSLRLSCAASGFTFSSYAMNWVRQAPGKGLEWVAGIIGSGGSTYYADSVKGRFSISRDNSKNTLDLQMNSLRAEDTAVYYCVKDWNTTMITERGQGTLVTVSSTTTPAPRPPTPAPTIASQPLSLRPEACRPAAGGAVHTRGLDFACDIYIWAPLAGTCGVLLLSLVITLYCKRGRKKLLYIFKQPFMRPVQTTQEEDGCSCRFPEEEEGGCELRVKFSRSADAPAYKQGQNQLYNELNLGRREEYDVLDKRRGRDPEMGGKPRRKNPQEGLYNELQKDKMAEAYSEIGMKGERRRGKGHDGLYQGLSTATKDTYDALHMQALPPR

SEQ ID NO: 18001 - DNA, 1089 bp, synthetic construct
  misc_feature 1..1089: note = Synthetic Sequence
  source 1..1089: mol_type = other DNA
atggctctgcctgtgacagctctgctgctgcctctggctctgcttcttcatgcggcgcgccctgaagttcagctgcttgaatctggcggaggcctggttcaacctggcggatctctgagactgagctgtgccgccagcggcttcacctttagcagctacgccatgaactgggtccgacaggcccctggcaaaggactggaatgggtggccggaatcatcggcagcggcggcagcacatattacgccgattctgtgaagggccgcttcagcatcagccgggacaacagcaagaacaccctggacctgcagatgaacagcctgagagccgaggataccgccgtgtactactgcgtgaaggattggaacaccaccatgatcaccgagagaggccagggcacactggtcaccgtgtcctctacaacaacaccggcgcctcggcctccaacaccagctcctacaatcgcgagtcagcccctgtctctcagacccgaagcctgtagacctgctgctggcggagctgtgcataccagaggactggatttcgcctgcgacatctacatctgggctcctctggctggcacatgcggagttttgctgctgagcctggtcatcaccctgtactgtaagagaggcaggaagaagctgctgtatatcttcaagcagcccttcatgagacccgtgcagaccacacaggaggaggacggctgctcttgtaggttcccagaggaggaggagggaggatgcgagctgcgcgtgaagtttagccggtccgccgatgcacctgcatacaagcagggacagaaccagctgtataacgagctgaatctgggccggagagaggagtacgacgtgctggataagaggcggggccgggaccccgagatgggaggcaagcctcggagaaagaacccacaggagggcctgtacaatgagctgcaaaaggacaagatggccgaggcctattctgagatcggcatgaagggagagaggcgccggggcaagggacacgatggcctgtaccagggcctgagcaccgccacaaaggacacctatgatgccctgcacatgcaggccctgccccctagatga

SEQ ID NO: 18002 - protein, 362 aa, synthetic construct
  REGION 1..362: note = Synthetic Sequence
MALPVTALLLPLALLLHAARPEVQLLESGGGLVQPGGSLTLSCAASGFTFSNYAMNWVRQAPGKGLEWVSGIIGSGATTYYADSVKGRFTISRDNSKNTLNLQMNSLRAEDTAIYYCVKDWNTTMITERGQGTLVTVSSTTTPAPRPPTPAPTIASQPLSLRPEACRPAAGGAVHTRGLDFACDIYIWAPLAGTCGVLLLSLVITLYCKRGRKKLLYIFKQPFMRPVQTTQEEDGCSCRFPEEEEGGCELRVKFSRSADAPAYKQGQNQLYNELNLGRREEYDVLDKRRGRDPEMGGKPRRKNPQEGLYNELQKDKMAEAYSEIGMKGERRRGKGHDGLYQGLSTATKDTYDALHMQALPPR

SEQ ID NO: 18003 - DNA, 1089 bp, synthetic construct
  misc_feature 1..1089: note = Synthetic Sequence
  source 1..1089: mol_type = other DNA
atggctctgcctgtgacagctctgctgctgcctctggctctgcttcttcatgcggcgcgccctgaagttcagctgcttgaatctggcggaggcctggttcaacctggcggatctctgacactgagctgtgccgccagcggcttcaccttcagcaactacgccatgaactgggtccgacaggcccctggcaaaggccttgaatgggtgtccggcatcattggctctggcgccaccacctactacgccgattctgtgaagggcagattcaccatcagccgggacaacagcaagaacaccctgaacctgcagatgaacagcctgagagccgaggacaccgccatctactactgcgtgaaggactggaacaccaccatgatcaccgagagaggccagggcacactggtcaccgtgtcctctacaacaacaccggcgcctcggcctccaacaccagctcctacaatcgcgagtcagcccctgtctctcagacccgaagcctgtagacctgctgctggcggagctgtgcataccagaggactggatttcgcctgcgacatctacatctgggctcctctggctggcacatgcggagttttgctgctgagcctggtcatcaccctgtactgtaagagaggcaggaagaagctgctgtatatcttcaagcagcccttcatgagacccgtgcagaccacacaggaggaggacggctgctcttgtaggttcccagaggaggaggagggaggatgcgagctgcgcgtgaagtttagccggtccgccgatgcacctgcatacaagcagggacagaaccagctgtataacgagctgaatctgggccggagagaggagtacgacgtgctggataagaggcggggccgggaccccgagatgggaggcaagcctcggagaaagaacccacaggagggcctgtacaatgagctgcaaaaggacaagatggccgaggcctattctgagatcggcatgaagggagagaggcgccggggcaagggacacgatggcctgtaccagggcctgagcaccgccacaaaggacacctatgatgccctgcacatgcaggccctgccccctagatga

SEQ ID NO: 18004 - protein, 362 aa, synthetic construct
  REGION 1..362: note = Synthetic Sequence
MALPVTALLLPLALLLHAARPEVQLLESGGGLVQPGESLRLSCAASGFTFSNYAMNWVRQAPGKGLEWVSGIVGGGGTSYYADSVRGRFTISRDNSKNTLYLQMNSLRAEDTAVYYCVKDWNTTMITERGQGTLVTVSSTTTPAPRPPTPAPTIASQPLSLRPEACRPAAGGAVHTRGLDFACDIYIWAPLAGTCGVLLLSLVITLYCKRGRKKLLYIFKQPFMRPVQTTQEEDGCSCRFPEEEEGGCELRVKFSRSADAPAYKQGQNQLYNELNLGRREEYDVLDKRRGRDPEMGGKPRRKNPQEGLYNELQKDKMAEAYSEIGMKGERRRGKGHDGLYQGLSTATKDTYDALHMQALPPR

SEQ ID NO: 18005 - DNA, 1089 bp, synthetic construct
  misc_feature 1..1089: note = Synthetic Sequence
  source 1..1089: mol_type = other DNA
atggctctgcctgtgacagctctgctgctgcctctggctctgcttcttcatgcggcgcgccctgaagttcagctgcttgaatctggcggaggcctggttcagcctggcgaatctctgagactgagctgtgccgccagcggcttcaccttcagcaactacgccatgaactgggtccgacaggcccctggcaaaggccttgaatgggtgtccggaatcgttggcggcggaggcacaagctactacgccgattctgtgcggggcagattcaccatcagccgggacaacagcaagaacaccctgtacctgcagatgaacagcctgagagccgaggacaccgccgtgtactactgcgtgaaggactggaacaccaccatgatcaccgagagaggccagggcacactggtcaccgtgtcctctacaacaacaccggcgcctcggcctccaacaccagctcctacaatcgcgagtcagcccctgtctctcagacccgaagcctgtagacctgctgctggcggagctgtgcataccagaggactggatttcgcctgcgacatctacatctgggctcctctggctggcacatgcggagttttgctgctgagcctggtcatcaccctgtactgtaagagaggcaggaagaagctgctgtatatcttcaagcagcccttcatgagacccgtgcagaccacacaggaggaggacggctgctcttgtaggttcccagaggaggaggagggaggatgcgagctgcgcgtgaagtttagccggtccgccgatgcacctgcatacaagcagggacagaaccagctgtataacgagctgaatctgggccggagagaggagtacgacgtgctggataagaggcggggccgggaccccgagatgggaggcaagcctcggagaaagaacccacaggagggcctgtacaatgagctgcaaaaggacaagatggccgaggcctattctgagatcggcatgaagggagagaggcgccggggcaagggacacgatggcctgtaccagggcctgagcaccgccacaaaggacacctatgatgccctgcacatgcaggccctgccccctagatga

SEQ ID NO: 18006 - protein, 362 aa, synthetic construct
  REGION 1..362: note = Synthetic Sequence
MALPVTALLLPLALLLHAARPEVQLLESGGGLVQPGGSLRLSCAASGFTFSNYAMTWIRQAPGKGLEWVSGITGDGGSTFYADSVKGRFTISRDNSKNTLYLQMNSLRAEDTAVYYCVKDWNTTMITERGQGTLVTVSSTTTPAPRPPTPAPTIASQPLSLRPEACRPAAGGAVHTRGLDFACDIYIWAPLAGTCGVLLLSLVITLYCKRGRKKLLYIFKQPFMRPVQTTQEEDGCSCRFPEEEEGGCELRVKFSRSADAPAYKQGQNQLYNELNLGRREEYDVLDKRRGRDPEMGGKPRRKNPQEGLYNELQKDKMAEAYSEIGMKGERRRGKGHDGLYQGLSTATKDTYDALHMQALPPR

SEQ ID NO: 18007 - DNA, 1089 bp, synthetic construct
  misc_feature 1..1089: note = Synthetic Sequence
  source 1..1089: mol_type = other DNA
atggctctgcctgtgacagctctgctgctgcctctggctctgcttcttcatgcggcgcgccctgaagttcagctgcttgaatctggcggaggcctggttcaacctggcggatctctgagactgagctgtgccgccagcggcttcaccttcagcaattacgccatgacctggatcagacaggcccctggcaaaggcctggaatgggtgtccggaattacaggcgacggcggcagcaccttttacgccgattctgtgaagggcagattcaccatcagccgggacaacagcaagaacaccctgtacctgcagatgaacagcctgagagccgaggacaccgccgtgtactactgcgtgaaggactggaacaccaccatgatcaccgagagaggccagggcacactggtcaccgtgtcctctacaacaacaccggcgcctcggcctccaacaccagctcctacaatcgcgagtcagcccctgtctctcagacccgaagcctgtagacctgctgctggcggagctgtgcataccagaggactggatttcgcctgcgacatctacatctgggctcctctggctggcacatgcggagttttgctgctgagcctggtcatcaccctgtactgtaagagaggcaggaagaagctgctgtatatcttcaagcagcccttcatgagacccgtgcagaccacacaggaggaggacggctgctcttgtaggttcccagaggaggaggagggaggatgcgagctgcgcgtgaagtttagccggtccgccgatgcacctgcatacaagcagggacagaaccagctgtataacgagctgaatctgggccggagagaggagtacgacgtgctggataagaggcggggccgggaccccgagatgggaggcaagcctcggagaaagaacccacaggagggcctgtacaatgagctgcaaaaggacaagatggccgaggcctattctgagatcggcatgaagggagagaggcgccggggcaagggacacgatggcctgtaccagggcctgagcaccgccacaaaggacacctatgatgccctgcacatgcaggccctgccccctagatga

SEQ ID NO: 18008 - protein, 362 aa, synthetic construct
  REGION 1..362: note = Synthetic Sequence
MALPVTALLLPLALLLHAARPEVQLLESGGGLAQPGGSLRLSCAASGFTFSSYAMNWIRQAPGKGLEWVSGISGSGGSTYYADSVKGRFTISRDNSKNTVYLQMNSLRAEDTAVYYCVKDWNTTMITERGQGTLVTVSSTTTPAPRPPTPAPTIASQPLSLRPEACRPAAGGAVHTRGLDFACDIYIWAPLAGTCGVLLLSLVITLYCKRGRKKLLYIFKQPFMRPVQTTQEEDGCSCRFPEEEEGGCELRVKFSRSADAPAYKQGQNQLYNELNLGRREEYDVLDKRRGRDPEMGGKPRRKNPQEGLYNELQKDKMAEAYSEIGMKGERRRGKGHDGLYQGLSTATKDTYDALHMQALPPR

SEQ ID NO: 18009 - DNA, 1089 bp, synthetic construct
  misc_feature 1..1089: note = Synthetic Sequence
  source 1..1089: mol_type = other DNA
atggcactgcctgtgacagccctgctgctgcctctggccctgctgctgcacgcagcacggcccgaggtgcagctgctggagtccggaggaggcctggcccagcctggcggcagcctgaggctgtcctgcgccgcctctggcttcacctttagctcctacgccatgaactggatcagacaggcccctggcaagggcctggagtgggtgtccggcatctccggctctggaggctctacatactatgccgacagcgtgaagggccggttcaccatcagcagagataactccaagaataccgtgtacctccagatgaactctctgcgggccgaggacaccgccgtgtactattgcgtgaaggattggaataccacaatgatcacagagaggggccagggcaccctggtgacagtgtctagcaccacaacccctgcccccagacctcccacacccgcccctaccatcgcgagtcagccactgtccctgcggcctgaggcctgccggcccgccgccggcggagcagtgcacacacggggcctggactttgcctgtgacatctacatatgggcaccactggcaggaacctgcggcgtgctgctgctgagcctggtcatcaccctgtactgtaagagaggcaggaagaagctgctgtatatcttcaagcagcccttcatgagacccgtgcagaccacacaggaggaggacggctgctcttgtaggttcccagaggaggaggagggaggatgcgagctgcgcgtgaagtttagccggtccgccgatgcacctgcatacaagcagggacagaaccagctgtataacgagctgaatctgggccggagagaggagtacgacgtgctggataagaggcggggccgggaccccgagatgggaggcaagcctcggagaaagaacccacaggagggcctgtacaatgagctgcaaaaggacaagatggccgaggcctattctgagatcggcatgaagggagagaggcgccggggcaagggacacgatggcctgtaccagggcctgagcaccgccacaaaggacacctatgatgccctgcacatgcaggccctgccccctagatga

SEQ ID NO: 18010 - protein, 362 aa, synthetic construct
  REGION 1..362: note = Synthetic Sequence
MALPVTALLLPLALLLHAARPEVQLLESGGGLVQPGRSLRLSCAASGFTFTNYAMNWVRQAPGKGLEWVSGISGGGGSTYYADSVKGRFTISRDNSKNTLYLQMNSLRAEDTAVYYCVKDWNTTMITERGQGTLVTVSSTTTPAPRPPTPAPTIASQPLSLRPEACRPAAGGAVHTRGLDFACDIYIWAPLAGTCGVLLLSLVITLYCKRGRKKLLYIFKQPFMRPVQTTQEEDGCSCRFPEEEEGGCELRVKFSRSADAPAYKQGQNQLYNELNLGRREEYDVLDKRRGRDPEMGGKPRRKNPQEGLYNELQKDKMAEAYSEIGMKGERRRGKGHDGLYQGLSTATKDTYDALHMQALPPR

SEQ ID NO: 18011 - DNA, 1089 bp, synthetic construct
  misc_feature 1..1089: note = Synthetic Sequence
  source 1..1089: mol_type = other DNA
atggcactgcctgtgacagccctgctgctgcctctggccctgctgctgcacgcagcacggcccgaggtgcagctgctggagtctggaggaggcctggtgcagcccggccggtccctgagactgtcttgcgccgccagcggcttcacctttacaaactacgccatgaattgggtgcggcaggcccctggcaagggcctggagtgggtgtctggcatcagcggaggaggaggcagcacctactatgcagactccgtgaagggcaggttcaccatctcccgcgataactctaagaatacactgtacctccagatgaacagcctgagggcagaggacaccgccgtgtactattgcgtgaaggattggaataccacaatgatcacagagaggggacagggcaccctggtgaccgtgagcagcaccacaacccctgcccccagacctcccacacccgcccctaccatcgcgagtcagccactgtccctgcggcctgaggcctgccggcccgccgccggcggagcagtgcacacacggggcctggactttgcctgtgacatctacatatgggcaccactggcaggaacctgcggcgtgctgctgctgagcctggtcatcaccctgtactgtaagagaggcaggaagaagctgctgtatatcttcaagcagcccttcatgagacccgtgcagaccacacaggaggaggacggctgctcttgtaggttcccagaggaggaggagggaggatgcgagctgcgcgtgaagtttagccggtccgccgatgcacctgcatacaagcagggacagaaccagctgtataacgagctgaatctgggccggagagaggagtacgacgtgctggataagaggcggggccgggaccccgagatgggaggcaagcctcggagaaagaacccacaggagggcctgtacaatgagctgcaaaaggacaagatggccgaggcctattctgagatcggcatgaagggagagaggcgccggggcaagggacacgatggcctgtaccagggcctgagcaccgccacaaaggacacctatgatgccctgcacatgcaggccctgccccctagatga

SEQ ID NO: 18012 - protein, 21 aa, synthetic construct
  REGION 1..21: note = Synthetic Sequence
MALPVTALLLPLALLLHAARP

SEQ ID NO: 18013 - DNA, 63 bp, synthetic construct; identical to SEQ ID NO: 17504
  misc_feature 1..63: note = Synthetic Sequence
  source 1..63: mol_type = other DNA

SEQ ID NO: 18014 - protein, 24 aa, synthetic construct
  REGION 1..24: note = Synthetic Sequence
IYIWAPLAGTCGVLLLSLVITLYC

SEQ ID NO: 18015 - DNA, 72 bp, synthetic construct; identical to SEQ ID NO: 17506
  misc_feature 1..72: note = Synthetic Sequence
  source 1..72: mol_type = other DNA

SEQ ID NO: 18016 - protein, 112 aa, synthetic construct; identical to SEQ ID NO: 17507
  REGION 1..112: note = Synthetic Sequence

SEQ ID NO: 18017 - DNA, 336 bp, synthetic construct; identical to SEQ ID NO: 17508
  misc_feature 1..336: note = Synthetic Sequence
  source 1..336: mol_type = other DNA

SEQ ID NO: 18018 - protein, 42 aa, synthetic construct; identical to SEQ ID NO: 17509
  REGION 1..42: note = Synthetic Sequence

SEQ ID NO: 18019 - DNA, 126 bp, synthetic construct; identical to SEQ ID NO: 17510
  misc_feature 1..126: note = Synthetic Sequence
  source 1..126: mol_type = other DNA

SEQ ID NO: 18020 - protein, 45 aa, synthetic construct; identical to SEQ ID NO: 17511
  REGION 1..45: note = Synthetic Sequence

SEQ ID NO: 18021 - DNA, 135 bp, synthetic construct; identical to SEQ ID NO: 17512
  misc_feature 1..135: note = Synthetic Sequence
  source 1..135: mol_type = other DNA

SEQ ID NO: 18022 - protein, 107 aa, Homo sapiens; identical to SEQ ID NO: 14635

SEQ ID NO: 18023 - DNA, 321 bp, Homo sapiens; identical to SEQ ID NO: 14636
  source 1..321: mol_type = other DNA

SEQ ID NO: 18024 - protein, 5 aa, synthetic construct
  REGION 1..5: note = Synthetic Sequence
GGGGS

SEQ ID NO: 18025 - protein, 15 aa, synthetic construct
  REGION 1..15: note = Synthetic Sequence
GGAGGAGGAGGATCC

SEQ ID NO: 18026 - protein, 282 aa, synthetic construct; identical to SEQ ID NO: 14639
  REGION 1..282: note = Synthetic Sequence

SEQ ID NO: 18027 - DNA, 843 bp, synthetic construct
  misc_feature 1..843: note = Synthetic Sequence
  source 1..843: mol_type = other DNA
tttggggacgtgggggccctggagtctctgcgaggaaatgccgatctggcttacatcctgagcatggaaccctgcggccactgtctgatcattaacaatgtgaacttctgcagagaaagcggactgcgaacacggactggctccaatattgactgtgagaagctgcggagaaggttctctagtctgcactttatggtcgaagtgaaaggggatctgaccgccaagaaaatggtgctggccctgctggagctggctcagcaggaccatggagctctggattgctgcgtggtcgtgatcctgtcccacgggtgccaggcttctcatctgcagttccccggagcagtgtacggaacagacggctgtcctgtcagcgtggagaagatcgtcaacatcttcaacggcacttcttgccctagtctggggggaaagccaaaactgttctttatccaggcctgtggcggggaacagaaagatcacggcttcgaggtggccagcaccagccctgaggacgaatcaccagggagcaaccctgaaccagatgcaactccattccaggagggactgaggacctttgaccagctggatgctatctcaagcctgcccactcctagtgacattttcgtgtcttacagtaccttcccaggctttgtctcatggcgcgatcccaagtcagggagctggtacgtggagacactggacgacatctttgaacagtgggcccattcagaggacctgcagagcctgctgctgcgagtggcaaacgctgtctctgtgaagggcatctacaaacagatgcccgggtgcttcaattttctgagaaagaaactgttctttaagacttcc

SEQ ID NO: 18028 - protein, 394 aa, synthetic construct; identical to SEQ ID NO: 14641
  REGION 1..394: note = Synthetic Sequence

SEQ ID NO: 18029 - DNA, 1182 bp, synthetic construct; identical to SEQ ID NO: 14642
  misc_feature 1..1182: note = Synthetic Sequence
  source 1..1182: mol_type = other DNA

SEQ ID NO: 18030 - protein, 18 aa, synthetic construct
  REGION 1..18: note = Synthetic Sequence
EGRGSLLTCGDVEENPGP

SEQ ID NO: 18031 - protein, 21 aa, synthetic construct
  REGION 1..21: note = Synthetic Sequence
GSGEGRGSLLTCGDVEENPGP

SEQ ID NO: 18032 - DNA, 63 bp, synthetic construct
  misc_feature 1..63: note = Synthetic Sequence
  source 1..63: mol_type = other DNA
ggatctggagagggaaggggaagcctgctgacctgtggagacgtggaggaaaacccaggacca

SEQ ID NO: 18033 - protein, 20 aa, synthetic construct
  REGION 1..20: note = Synthetic Sequence
QCTNYALLKLAGDVESNPGP

SEQ ID NO: 18034 - protein, 23 aa, synthetic construct
  REGION 1..23: note = Synthetic Sequence
GSGQCTNYALLKLAGDVESNPGP

SEQ ID NO: 18035 - protein, 22 aa, synthetic construct
  REGION 1..22: note = Synthetic Sequence
VKQTLNFDLLKLAGDVESNPGP

SEQ ID NO: 18036 - protein, 25 aa, synthetic construct
  REGION 1..25: note = Synthetic Sequence
GSGVKQTLNFDLLKLAGDVESNPGP

SEQ ID NO: 18037 - protein, 19 aa, synthetic construct
  REGION 1..19: note = Synthetic Sequence
ATNFSLLKQAGDVEENPGP

SEQ ID NO: 18038 - protein, 22 aa, synthetic construct
  REGION 1..22: note = Synthetic Sequence
GSGATNFSLLKQAGDVEENPGP

SEQ ID NO: 18039 - skipped

SEQ ID NO: 18040 - protein, 1053 aa, Staphylococcus aureus
MKRNYILGLDIGITSVGYGIIDYETRDVIDAGVRLFKEANVENNEGRRSKRGARRLKRRRRHRIQRVKKLLFDYNLLTDHSELSGINPYEARVKGLSQKLSEEEFSAALLHLAKRRGVHNVNEVEEDTGNELSTKEQISRNSKALEEKYVAELQLERLKKDGEVRGSINRFKTSDYVKEAKQLLKVQKAYHQLDQSFIDTYIDLLETRRTYYEGPGEGSPFGWKDIKEWYEMLMGHCTYFPEELRSVKYAYNADLYNALNDLNNLVITRDENEKLEYYEKFQIIENVFKQKKKPTLKQIAKEILVNEEDIKGYRVTSTGKPEFTNLKVYHDIKDITARKEIIENAELLDQIAKILTIYQSSEDIQEELTNLNSELTQEEIEQISNLKGYTGTHNLSLKAINLILDELWHTNDNQIAIFNRLKLVPKKVDLSQQKEIPTTLVDDFILSPVVKRSFIQSIKVINAIIKKYGLPNDIIIELAREKNSKDAQKMINEMQKRNRQTNERIEEIIRTTGKENAKYLIEKIKLHDMQEGKCLYSLEAIPLEDLLNNPFNYEVDHIIPRSVSFDNSFNNKVLVKQEENSKKGNRTPFQYLSSSDSKISYETFKKHILNLAKGKGRISKTKKEYLLEERDINRFSVQKDFINRNLVDTRYATRGLMNLLRSYFRVNNLDVKVKSINGGFTSFLRRKWKFKKERNKGYKHHAEDALIIANADFIFKEWKKLDKAKKVMENQMFEEKQAESMPEIETEQEYKEIFITPHQIKHIKDFKDYKYSHRVDKKPNRELINDTLYSTRKDDKGNTLIVNNLNGLYDKDNDKLKKLINKSPEKLLMYHHDPQTYQKLKLIMEQYGDEKNPLYKYYEETGNYLTKYSKKDNGPVIKKIKYYGNKLNAHLDITDDYPNSRNKVVKLSLKPYRFDVYLDNGVYKFVTVKNLDVIKKENYYEVNSKCYEEAKKLKKISNQAEFIASFYNNDLIKINGELYRVIGVNNDLLNRIEVNMIDITYREYLENMNDKRPPRIIKTIASKTQSIKKYSTDILGNLYEVKSKKHPQIIKKG

SEQ ID NO: 18041 - protein, 1053 aa, synthetic construct
  REGION 1..1053: note = Synthetic Sequence
MKRNYILGLAIGITSVGYGIIDYETRDVIDAGVRLFKEANVENNEGRRSKRGARRLKRRRRHRIQRVKKLLFDYNLLTDHSELSGINPYEARVKGLSQKLSEEEFSAALLHLAKRRGVHNVNEVEEDTGNELSTKEQISRNSKALEEKYVAELQLERLKKDGEVRGSINRFKTSDYVKEAKQLLKVQKAYHQLDQSFIDTYIDLLETRRTYYEGPGEGSPFGWKDIKEWYEMLMGHCTYFPEELRSVKYAYNADLYNALNDLNNLVITRDENEKLEYYEKFQIIENVFKQKKKPTLKQIAKEILVNEEDIKGYRVTSTGKPEFTNLKVYHDIKDITARKEIIENAELLDQIAKILTIYQSSEDIQEELTNLNSELTQEEIEQISNLKGYTGTHNLSLKAINLILDELWHTNDNQIAIFNRLKLVPKKVDLSQQKEIPTTLVDDFILSPVVKRSFIQSIKVINAIIKKYGLPNDIIIELAREKNSKDAQKMINEMQKRNRQTNERIEEIIRTTGKENAKYLIEKIKLHDMQEGKCLYSLEAIPLEDLLNNPFNYEVDHIIPRSVSFDNSFNNKVLVKQEEASKKGNRTPFQYLSSSDSKISYETFKKHILNLAKGKGRISKTKKEYLLEERDINRFSVQKDFINRNLVDTRYATRGLMNLLRSYFRVNNLDVKVKSINGGFTSFLRRKWKFKKERNKGYKHHAEDALIIANADFIFKEWKKLDKAKKVMENQMFEEKQAESMPEIETEQEYKEIFITPHQIKHIKDFKDYKYSHRVDKKPNRELINDTLYSTRKDDKGNTLIVNNLNGLYDKDNDKLKKLINKSPEKLLMYHHDPQTYQKLKLIMEQYGDEKNPLYKYYEETGNYLTKYSKKDNGPVIKKIKYYGNKLNAHLDITDDYPNSRNKVVKLSLKPYRFDVYLDNGVYKFVTVKNLDVIKKENYYEVNSKCYEEAKKLKKISNQAEFIASFYNNDLIKINGELYRVIGVNNDLLNRIEVNMIDITYREYLENMNDKRPPRIIKTIASKTQSIKKYSTDILGNLYEVKSKKHPQIIKKG

SEQ ID NO: 18042 - protein, 1368 aa, synthetic construct
  REGION 1..1368: note = Synthetic Sequence
  SITE 1: note = misc_feature - Xaa can be any naturally occurring amino acid
XDKKYSIGLAIGTNSVGWAVITDEYKVPSKKFKVLGNTDRHSIKKNLIGALLFDSGETAEATRLKRTARRRYTRRKNRICYLQEIFSNEMAKVDDSFFHRLEESFLVEEDKKHERHPIFGNIVDEVAYHEKYPTIYHLRKKLVDSTDKADLRLIYLALAHMIKFRGHFLIEGDLNPDNSDVDKLFIQLVQTYNQLFEENPINASGVDAKAILSARLSKSRRLENLIAQLPGEKKNGLFGNLIALSLGLTPNFKSNFDLAEDAKLQLSKDTYDDDLDNLLAQIGDQYADLFLAAKNLSDAILLSDILRVNTEITKAPLSASMIKRYDEHHQDLTLLKALVRQQLPEKYKEIFFDQSKNGYAGYIDGGASQEEFYKFIKPILEKMDGTEELLVKLNREDLLRKQRTFDNGSIPHQIHLGELHAILRRQEDFYPFLKDNREKIEKILTFRIPYYVGPLARGNSRFAWMTRKSEETITPWNFEEVVDKGASAQSFIERMTNFDKNLPNEKVLPKHSLLYEYFTVYNELTKVKYVTEGMRKPAFLSGEQKKAIVDLLFKTNRKVTVKQLKEDYFKKIECFDSVEISGVEDRFNASLGTYHDLLKIIKDKDFLDNEENEDILEDIVLTLTLFEDREMIEERLKTYAHLFDDKVMKQLKRRRYTGWGRLSRKLINGIRDKQSGKTILDFLKSDGFANRNFMQLIHDDSLTFKEDIQKAQVSGQGDSLHEHIANLAGSPAIKKGILQTVKVVDELVKVMGRHKPENIVIEMARENQTTQKGQKNSRERMKRIEEGIKELGSQILKEHPVENTQLQNEKLYLYYLQNGRDMYVDQELDINRLSDYDVDAIVPQSFLKDDSIDNKVLTRSDKNRGKSDNVPSEEVVKKMKNYWRQLLNAKLITQRKFDNLTKAERGGLSELDKAGFIKRQLVETRQITKHVAQILDSRMNTKYDENDKLIREVKVITLKSKLVSDFRKDFQFYKVREINNYHHAHDAYLNAVVGTALIKKYPKLESEFVYGDYKVYDVRKMIAKSEQEIGKATAKYFFYSNIMNFFKTEITLANGEIRKRPLIETNGETGEIVWDKGRDFATVRKVLSMPQVNIVKKTEVQTGGFSKESILPKRNSDKLIARKKDWDPKKYGGFDSPTVAYSVLVVAKVEKGKSKKLKSVKELLGITIMERSSFEKNPIDFLEAKGYKEVKKDLIIKLPKYSLFELENGRKRMLASAGELQKGNELALPSKYVNFLYLASHYEKLKGSPEDNEQKQLFVEQHKHYLDEIIEQISEFSKRVILADANLDKVLSAYNKHRDKPIREQAENIIHLFTLTNLGAPAAFKYFDTTIDRKRYTSTKEVLDATLIHQSITGLYETRIDLSQLGGD

SEQ ID NO: 18043 - protein, 1368 aa, synthetic construct
  REGION 1..1368: note = Synthetic Sequence
MDKKYSIGLAIGTNSVGWAVITDEYKVPSKKFKVLGNTDRHSIKKNLIGALLFDSGETAEATRLKRTARRRYTRRKNRICYLQEIFSNEMAKVDDSFFHRLEESFLVEEDKKHERHPIFGNIVDEVAYHEKYPTIYHLRKKLVDSTDKADLRLIYLALAHMIKFRGHFLIEGDLNPDNSDVDKLFIQLVQTYNQLFEENPINASGVDAKAILSARLSKSRRLENLIAQLPGEKKNGLFGNLIALSLGLTPNFKSNFDLAEDAKLQLSKDTYDDDLDNLLAQIGDQYADLFLAAKNLSDAILLSDILRVNTEITKAPLSASMIKRYDEHHQDLTLLKALVRQQLPEKYKEIFFDQSKNGYAGYIDGGASQEEFYKFIKPILEKMDGTEELLVKLNREDLLRKQRTFDNGSIPHQIHLGELHAILRRQEDFYPFLKDNREKIEKILTFRIPYYVGPLARGNSRFAWMTRKSEETITPWNFEEVVDKGASAQSFIERMTNFDKNLPNEKVLPKHSLLYEYFTVYNELTKVKYVTEGMRKPAFLSGEQKKAIVDLLFKTNRKVTVKQLKEDYFKKIECFDSVEISGVEDRFNASLGTYHDLLKIIKDKDFLDNEENEDILEDIVLTLTLFEDREMIEERLKTYAHLFDDKVMKQLKRRRYTGWGRLSRKLINGIRDKQSGKTILDFLKSDGFANRNFMQLIHDDSLTFKEDIQKAQVSGQGDSLHEHIANLAGSPAIKKGILQTVKVVDELVKVMGRHKPENIVIEMARENQTTQKGQKNSRERMKRIEEGIKELGSQILKEHPVENTQLQNEKLYLYYLQNGRDMYVDQELDINRLSDYDVDAIVPQSFLKDDSIDNKVLTRSDKNRGKSDNVPSEEVVKKMKNYWRQLLNAKLITQRKFDNLTKAERGGLSELDKAGFIKRQLVETRQITKHVAQILDSRMNTKYDENDKLIREVKVITLKSKLVSDFRKDFQFYKVREINNYHHAHDAYLNAVVGTALIKKYPKLESEFVYGDYKVYDVRKMIAKSEQEIGKATAKYFFYSNIMNFFKTEITLANGEIRKRPLIETNGETGEIVWDKGRDFATVRKVLSMPQVNIVKKTEVQTGGFSKESILPKRNSDKLIARKKDWDPKKYGGFDSPTVAYSVLVVAKVEKGKSKKLKSVKELLGITIMERSSFEKNPIDFLEAKGYKEVKKDLIIKLPKYSLFELENGRKRMLASAGELQKGNELALPSKYVNFLYLASHYEKLKGSPEDNEQKQLFVEQHKHYLDEIIEQISEFSKRVILADANLDKVLSAYNKHRDKPIREQAENIIHLFTLTNLGAPAAFKYFDTTIDRKRYTSTKEVLDATLIHQSITGLYETRIDLSQLGGD

SEQ ID NO: 18044 - protein, 199 aa, synthetic construct
  REGION 1..199: note = Synthetic Sequence
EGIKSNISLLKDELRGQISHISHEYLSLIDLAFDSKQNRLFEMKVLELLVNEYGFKGRHLGGSRKPDGIVYSTTLEDNFGIIVDTKAYSEGYSLPISQADEMERYVRENSNRDEEVNPNKWWENFSEEVKKYYFVFISGSFKGKFEEQLRRLSMTTGVNGSAVNVVNLLLGAEKIRSGEMTIEELERAMFNNSEFILKY

SEQ ID NO: 18045 - protein, 1591 aa, synthetic construct; identical to SEQ ID NO: 17013
  REGION 1..1591: note = Synthetic Sequence

SEQ ID NO: 18046 - DNA, 4776 bp, synthetic construct; identical to SEQ ID NO: 17014
  misc_feature 1..4776: note = Synthetic Sequence
  source 1..4776: mol_type = other DNA

SEQ ID NO: 18047 - protein, 1588 aa, synthetic construct; identical to SEQ ID NO: 17058
  REGION 1..1588: note = Synthetic Sequence

SEQ ID NO: 18048 - DNA, 4767 bp, synthetic construct; identical to SEQ ID NO: 17059
  misc_feature 1..4767: note = Synthetic Sequence
  source 1..4767: mol_type = other DNA

SEQ ID NO: 18049 - skipped

SEQ ID NO: 18050 - protein, 118 aa, synthetic construct
  REGION 1..118: note = Synthetic Sequence
EVQLLESGGGLVQPGGSLTLSCAASGFTFSNYAMNWVRQAPGKGLEWVSGIIGSGATTYYADSVKGRFTISRDNSKNTLNLQMNSLRAEDTAIYYCVKDWNTTMITERGQGTLVTVSS

SEQ ID NO: 18051 - protein, 118 aa, synthetic construct
  REGION 1..118: note = Synthetic Sequence
EVQLLESGGGLVQPGGSLRLSCAASGFTFSNYAMTWIRQAPGKGLEWVSGITGDGGSTFYADSVKGRFTISRDNSKNTLYLQMNSLRAEDTAVYYCVKDWNTTMITERGQGTLVTVSS

SEQ ID NO: 18052 - protein, 118 aa, synthetic construct
  REGION 1..118: note = Synthetic Sequence
EVQLLESGGGLVQPGGSLRLSCAASGFTFSSYAMNWVRQAPGKGLEWVAGIIGSGGSTYYADSVKGRFSISRDNSKNTLDLQMNSLRAEDTAVYYCVKDWNTTMITERGQGTLVTVSS

SEQ ID NO: 18053 - protein, 118 aa, synthetic construct
  REGION 1..118: note = Synthetic Sequence
EVQLLESGGGLAQPGGSLRLSCAASGFTFSSYAMNWIRQAPGKGLEWVSGISGSGGSTYYADSVKGRFTISRDNSKNTVYLQMNSLRAEDTAVYYCVKDWNTTMITERGQGTLVTVSS

SEQ ID NO: 18054 - protein, 118 aa, synthetic construct
  REGION 1..118: note = Synthetic Sequence
EVQLLESGGGLVQPGRSLRLSCAASGFTFTNYAMNWVRQAPGKGLEWVSGISGGGGSTYYADSVKGRFTISRDNSKNTLYLQMNSLRAEDTAVYYCVKDWNTTMITERGQGTLVTVSS

SEQ ID NO: 18055 - protein, 118 aa, synthetic construct
  REGION 1..118: note = Synthetic Sequence
EVQLLESGGGLVQPGESLRLSCAASGFTFSNYAMNWVRQAPGKGLEWVSGIVGGGGTSYYADSVRGRFTISRDNSKNTLYLQMNSLRAEDTAVYYCVKDWNTTMITERGQGTLVTVSS

SEQ ID NO: 18056 - protein, 8 aa, synthetic construct
  REGION 1..8: note = Synthetic Sequence
GFTFSNYA

SEQ ID NO: 18057 - protein, 8 aa, synthetic construct
  REGION 1..8: note = Synthetic Sequence
GFTFSSYA

SEQ ID NO: 18058 - protein, 8 aa, synthetic construct
  REGION 1..8: note = Synthetic Sequence
GFTFTNYA

SEQ ID NO: 18059 - protein, 8 aa, synthetic construct
  REGION 1..8: note = Synthetic Sequence
IIGSGATT

SEQ ID NO: 18060 - protein, 8 aa, synthetic construct
  REGION 1..8: note = Synthetic Sequence
ITGDGGST

SEQ ID NO: 18061 - protein, 8 aa, synthetic construct
  REGION 1..8: note = Synthetic Sequence
IIGSGGST

SEQ ID NO: 18062 - protein, 8 aa, synthetic construct
  REGION 1..8: note = Synthetic Sequence
ISGGGGST

SEQ ID NO: 18063 - protein, 8 aa, synthetic construct
  REGION 1..8: note = Synthetic Sequence
IVGGGGTS

SEQ ID NO: 18064 - protein, 11 aa, synthetic construct
  REGION 1..11: note = Synthetic Sequence
VKDWNTTMITE

SEQ ID NO: 18065 - protein, 25 aa, synthetic construct
  REGION 1..25: note = Synthetic Sequence
EVQLLESGGGLVQPGGSLTLSCAAS

SEQ ID NO: 18066 - protein, 25 aa, synthetic construct
  REGION 1..25: note = Synthetic Sequence
EVQLLESGGGLVQPGGSLRLSCAAS

SEQ ID NO: 18067 - protein, 25 aa, synthetic construct
  REGION 1..25: note = Synthetic Sequence
EVQLLESGGGLAQPGGSLRLSCAAS

SEQ ID NO: 18068 - protein, 25 aa, synthetic construct
  REGION 1..25: note = Synthetic Sequence
EVQLLESGGGLVQPGRSLRLSCAAS

SEQ ID NO: 18069 - protein, 25 aa, synthetic construct
  REGION 1..25: note = Synthetic Sequence
EVQLLESGGGLVQPGESLRLSCAAS

SEQ ID NO: 18070 - protein, 17 aa, synthetic construct
  REGION 1..17: note = Synthetic Sequence
MNWVRQAPGKGLEWVSG

SEQ ID NO: 18071 - protein, 17 aa, synthetic construct
  REGION 1..17: note = Synthetic Sequence
MTWIRQAPGKGLEWVSG

SEQ ID NO: 18072 - protein, 17 aa, synthetic construct
  REGION 1..17: note = Synthetic Sequence
MNWVRQAPGKGLEWVAG

SEQ ID NO: 18073 - protein, 38 aa, synthetic construct
  REGION 1..38: note = Synthetic Sequence
YYADSVKGRFTISRDNSKNTLNLQMNSLRAEDTAIYYC

SEQ ID NO: 18074 - protein, 38 aa, synthetic construct
  REGION 1..38: note = Synthetic Sequence
FYADSVKGRFTISRDNSKNTLYLQMNSLRAEDTAVYYC

SEQ ID NO: 18075 - protein, 38 aa, synthetic construct
  REGION 1..38: note = Synthetic Sequence
YYADSVKGRFSISRDNSKNTLDLQMNSLRAEDTAVYYC

SEQ ID NO: 18076 - protein, 38 aa, synthetic construct
  REGION 1..38: note = Synthetic Sequence
YYADSVKGRFTISRDNSKNTVYLQMNSLRAEDTAVYYC

SEQ ID NO: 18077 - protein, 38 aa, synthetic construct
  REGION 1..38: note = Synthetic Sequence
YYADSVKGRFTISRDNSKNTLYLQMNSLRAEDTAVYYC

SEQ ID NO: 18078 - protein, 38 aa, synthetic construct
  REGION 1..38: note = Synthetic Sequence
YYADSVRGRFTISRDNSKNTLYLQMNSLRAEDTAVYYC

SEQ ID NO: 18079 - protein, 11 aa, synthetic construct
  REGION 1..11: note = Synthetic Sequence
RGQGTLVTVSS

SEQ ID NO: 18080 - protein, 11 aa, synthetic construct
  REGION 1..11: note = Synthetic Sequence
RGQGTLVTVSS
